(19) United States
(12) Patent Application Publication
(10) Pub. No.: US 2006/0217304 A1
(43) Pub. Date: Sep. 28, 2006

(54) Long lasting glucagon-like peptide 2 (GLP-2) for the treatment of gastrointestinal diseases and disorders

(76) Inventors: Dominique P. Bridon, San Francisco, CA (US); Nissab Boudjellab, Columbus, OH (US); Roger Leger, Saint-Lambert (CA); Martin Robitaille, Granby (CA); Karen Thibaudeau, Montreal (CA); Julie Carette, Ste-Catherine (CA)

Correspondence Address: MORRISON & FOERSTER LLP, 425 MARKET STREET, SAN FRANCISCO, CA, 94105-2482, US

(21) Appl. No.: 11/318,323

(22) Filed: Dec. 23, 2005

Related U.S. Application Data
(63) Continuation of application No. 10/203,808, filed on Aug. 12, 2002.
(60) Provisional application No. 60/269,276, filed on Feb. 16, 2001.

(51) Int. Cl. A61K 38/26; C07K 14/605

(52) U.S. Cl. 514/12; 530/324

(57) ABSTRACT

This invention relates to glucagon-like peptide 2 (GLP-2) derivatives. In particular, this invention relates to GLP-2 peptide derivatives having an extended in vivo half-life, for the treatment or prevention of gastrointestinal disorders or diseases such as inflammatory bowel disease and other gastrointestinal functions, from any segment of the gastrointestinal tract, from the oesophagus to the anus.

### FIELD OF THE INVENTION

[0001] This invention relates to glucagon-like peptide 2 (GLP-2) derivatives. In particular, this invention relates to GLP-2 peptide derivatives having an extended in vivo half-life, for the treatment or prevention of gastrointestinal disorders or diseases such as inflammatory bowel disease and other gastrointestinal functions, from any segment of the gastrointestinal tract, from the oesophagus to the anus.

### BACKGROUND OF THE INVENTION

[0002] GLP-2 is a 33 amino acid peptide expressed in a tissue-specific manner from the pleiotropic proglucagon gene, and thus part of the glucagon super-family of peptide hormones. Alternative post-translational processing of proglucagon occurs in pancreas, intestine and brain. Enzymatic cleavages in proglucagon produce numerous multifunctional peptide hormones involved in nutrient metabolism. The major bioactive hormones derived from proglucagon are in the pancreatic α-cells, and GLP-1 and GLP-2 in the intestinal L-cells and brain. It was first discovered to possess potent intestinotropic properties by Drucker et al. (see Proc. Natl. Acad. Sci., 1996, 93, (115), 7911-7916). GLP-2, as a natural intestinal-derived peptide, has been demonstrated to have a significant reparative activity for the mucosal epithelium of the small and large intestine. It has also been demonstrated to increase the ability of the intestine to digest and absorb nutrients, suggesting a potential therapeutic role in the treatment of intestinal insufficiency. Indeed, several studies have now confirmed that GLP-2 administration reduces or prevents intestinal damage in rodent models of colitis, enteritis, total parenteral nutrition and massive resection. Very recently, phase 2 clinical trials of GLP-2 have also been reported, in which patients with short bowel syndrome were demonstrated to exhibit an enhanced ability to absorb enteral nutrients after 30 days of GLP-2 administration, with apparently no undesirable side effects.

[0003] The principal metabolic pathway for GLP-2 clearance is through enzymatic degradation. GLP-2 has been shown to be rapidly degraded through the removal of its two N-terminal amino acids by dipeptidylpeptidase-IV (DPP-IV), which represents a major limitation because it leads to the complete inactivation of the peptide. As a result, the half-life of GLP-2 is thus quite short, and current GLP-2 treatment necessitates infusion or frequent injections. Renal clearance has also been shown to be involved in the clearance of GLP-2. The major action of GLP-2 involves stimulation of cell growth, and the mechanism coupling GLP-2 receptor activation, directly or indirectly, to cell proliferation has not been examined.

[0004] It has been shown that peptide analogs of native GLP-2 possess enhanced trophic activity at the small intestine as GLP-2 receptor agonists (see for example U.S. Pat. No. 5,990,077).

[0005] Although very useful, a critical disadvantage of GLP-2 peptides and analogs, as stated above, is their very short half-lives in vivo, which is typically not more than 2 minutes.

[0006] Inflammatory Bowel Disease (IBD) is a group of chronic disorders that cause inflammation or ulceration in the small and large intestines. It may even be life threatening, and there is currently no known cure. IBD commonly refers to ulcerative colitis (UC), limited to the colon and Crohn's disease (CD) which can involve the entire gastrointestinal tract, resulting in a chronic cycle of remissions and flares. Many pharmaceutical products are known to treat IBD, for example to suppress inflammation, to prevent flare-ups, to control symptoms such as pain or diarrhea, or to replace or supplement essential nutrients that are poorly absorbed because of extensive disease or surgery. Current treatment options include a wide variety of pharmaceutical products like aminosalicylates, corticosteroids, immune modulators, and anti-TNF-α agent, and are designed to reduce inflammation and relieve symptoms in addition to replacing lost fluids and nutrients. Most of these products however have a limited use in IBD because of their undesirable side effects on the body in general.

[0007] Approximately one million patients are treated for IBD every year in the United States and Europe, most of them generally suffering from either Crohn's disease or ulcerative colitis. In fact, it is not uncommon for subjects suffering from IBD to undergo radical surgery involving the removal of major parts of the intestine. Direct annual healthcare costs of IBD are approximately $US 700 million, and the total economic impact of both direct and indirect costs approximate between $2 and $3 billion a year worldwide. Existing treatments, while often providing relief, have some shortcomings.

[0008] U.S. Pat. No. 5,789,379 teaches GLP-2 analogs among which one has been developed as a long-acting compound (ALX-600™) and is currently in clinical trials. However, even if DPP-IV degradation of GLP-2 appears to be somehow prevented, its half-life remains limited by renal clearance, and does not exceed 2 minutes, as stated above.

[0009] A chimeric antibody (Remicade™) has been developed to bind specifically to human tumor necrosis factor alpha (TNFα) for the short-term treatment of Crohn's. This antibody is indicated for the reduction of the symptoms of moderate to severe Crohn's disease in patients who have had an inadequate response to conventionnal therapy with corticosteroids, other immunosuppressants and/or antibiotics. Nevertheless, serious side effects are observed with such treatment. For example, it has been associated with hypersensitivity reaction, serious infections including sepsis, as well as fatal infections. Its administration could further predispose patients to infections through TNF-blocking.

[0010] With the prevalence of IBD increasing in recent years, it would therefore be highly desirable to develop GLP-2 peptide derivatives or analogs capable of substantially maintaining the same level of activity, low toxicity and therapeutic advantages as GLP-2, but with a much longer in vivo half-life, thus avoiding the necessity for continuous administration thereof in the treatment of various diseases such as inflammatory bowel disease, Crohn's disease and ulcerative colitis representing the two major inflammatory bowel diseases.

### SUMMARY OF THE INVENTION

[0011] In accordance with the present invention, there is now provided a GLP-2 gastrointestinal tissue growth promoter derivative having an extended in vivo half-life when compared with the corresponding unmodified GLP-2 gastrointestinal growth promoter. More specifically, the GLP-2 derivative comprises a reactive entity coupled hereto and capable of reacting with available functionalities on a blood component, either in vivo or ex vivo, to form a stable covalent bond. The covalent bonding formed between the GLP-2 derivative and the blood component prevents undesirable cleavage of the GLP-2 by enzymes such as dipeptidylpeptidase IV, thereby extending its in vivo half-life and activity. The reactive entity may be on the N-terminal of the GLP-2 peptide, the C-terminal of the GLP-2 peptide, or on any other available site along the peptidic chain.

[0012] Preferred blood components comprise proteins such as immunoglobulins, including IgG and IgM, serum albumin, ferritin, steroid binding proteins, transferrin, thyroxin binding protein, α-2-macroglobulin, haptoglobin etc., serum albumin and IgG being more preferred, and serum albumin being the most preferred.

[0013] Preferred reactive entity are capable of forming a covalent bond with the blood component by reacting with amino groups, hydroxy groups or thiol groups present thereon, either in vivo or in vitro (or ex vivo). In a most preferred embodiment, the functionality on the protein will be a thiol group and the reactive entity will be a Michael acceptor, such as acrolein derivatives, haloacetates, haloacetamides, α,β-unsaturated ketones, α,β-unsaturated esters, α,β-unsaturated amides, α,β-unsaturated thioesters, and the like, maleimide or maleimido-containing group such as γ-maleimide-butyrylamide (GMBA) or maleimidopropionic acid (MPA), MPA being the most preferred.

[0014] In another aspect of the invention, there is provided a pharmaceutical composition comprising the present GLP-2 gastrointestinal tissue growth promoter derivative in combination with a pharmaceutically acceptable carrier. Such composition is useful for the treatment or prevention of bowel disorders or diseases such as inflammatory bowel disease and other gastrointestinal functions. The composition may also be used for gene therapy to induce cells to endogenously produce the gastrointestinal tissue growth promoter peptide derivative that may then be implanted in a subject to produce the desired biological effect. Finally, the composition may also be used for manufacturing pharmaceutical or veterinary compositions for the enhancement of large intestine tissue growth.

[0015] In a further embodiment of the present invention, there is provided a method for the treatment of prevention of bowel disorders or diseases such as inflammatory bowel disease, and gastrointestinal functions. The method comprises administering to a subject, preferably a mammal, animal or human, an effective amount of the present GLP-2 gastrointestinal tissue growth promoter derivative or a conjugate thereof, alone or in combination with a pharmaceutically acceptable carrier.

[0016] In a further aspect of the present invention, there is provided a conjugate comprising the present GLP-2 gastrointestinal tissue growth promoter derivative covalently bonded to a blood component.

[0017] In a further aspect of the present invention, there is provided a method for extending the in vivo half-life of a GLP-2 gastrointestinal tissue growth promoter in a subject, the method comprising covalently bonding the GLP-2 gastrointestinal tissue growth promoter derivative to a blood component. The covalent bonding may take place in vivo or in vitro.

[0018] Preferred gastrointestinal tissue growth promoter compounds are peptides such as GLP-2 and GLP-2 analogs, GLP-2 fragments, provided that such analog or fragment possesses gastrointestinal tissue growth promoting activity. Details of the sequences of these peptides, analogs and fragments are illustrated below.

[0019] A further use of the present compound derivative may be the determination of the intestinotrophic activity of a hormone when used in combination with the present compound derivative, and particularly when the compound is GLP-2, a GLP-2 analog or a GLP-2 fragment Such method comprises the steps of: (a) coadministering the hormone with an intestinotrophic amount of the GLP-2 derivative to a test subject; (2) assessing the subsequent growth of small and large intestine tissue in the test subject; and (3) determining whether the growth of small and/or large intestine tissue in the test subject is enhanced relative to control subjects treated with unmodified GLP-2, GLP-2 analog or GLP-2 derivative.

[0020] If a linking group is present, it is preferably defined as, without limitation, a straight or branched C₋₁₀ alkyl; a straight or branched C₁₋₁₀ alkyl partly or perfluorinated; a C₁₋₁₀ alkyl or fluoroalkyl wherein one or more carbon atom is replaced with O, N or S to form an ether or a thioether, o-, m- or p-disubstituted phenyl wherein the substituents are the same or different and are CH₂, O, S, NH, NR wherein R is H, Cl₁₋₁₀ alkyl or C₁₋₁₀ acyl; or disubstituted heterocycles such as furan, thiophene, pyran, oxazole, or thiazole.

### IN THE DRAWINGS

[0021] FIG. 1 illustrates the changes in small intestine wet weight in mice treated with saline or 5 μg of the compounds of Examples 1-8 twice daily, for 10 days (n=10/group). Results are expressed as mean delta weight vs. control±SEM.

[0022] FIG. 2 illustrates changes in small intestine and large intestine wet weight in mice treated with saline or 5, 25 or 50 μg of the compounds of Examples 5, 7 and 8, twice daily, for 10 days (n=10/group). Results are expressed as mean weight±SEM.

[0023] FIG. 3 illustrates the mean plasma concentrations for the compounds of Examples 5 and 8 in Sprague-Dawley rats following a single 500 nmol/kg intravenous or subcutaneous dose (n=4/group).

[0024] FIG. 4 illustrates detection of the compound of Example 8 conjugated to rat plasma proteins using a polyclonal antibody anti-GLP-2 antibody and comparison to the pattern obtained with an anti-rat albumin.

### DETAILED DESCRIPTION OF THE INVENTION

[0025] In vivo bioconjugation is the process of covalently bonding a molecule, such as the present gastrointestinal tissue growth promoter compound derivative, within the body, to target blood components, preferably proteins, in a manner that permits the substantial retention, or increase in some instances, of the biological activity of the original unmodified GLP-2 gastrointestinal tissue growth promoter peptide therein, while providing an extended duration of the biological activity though giving the GLP-2 derivative the biophysical parameters of the target blood component.

[0026] For the purposes of the present invention, the terms “analog” or “fragment” are meant to include amino acid sequences comprising peptides with different amino acid sequences from the native sequence, such as the GLP-2 sequence, but with similar or comparable activity. Such analogs preferably have an amino acid sequence at least 60%, and more preferably at least 80%, and most preferably at least 95% the same as that of either GLP-2 or a fragment of GLP-2 having the same number of amino acid residues.

[0027] In a more preferred embodiment, the present gastrointestinal tissue growth promoter peptide derivative comprise a GLP-2 gastrointestinal tissue growth promoter peptide that has been modified by coupling thereto a reactive entity, either directly or via a linking group, the reactive entity being capable of forming a covalent bond with a blood component, preferably blood proteins. The reactive entity must be stable in an aqueous environment, and preferred embodiments thereof comprise carboxy group, a phosphoryl group, an imidate group, or an acyl group either as an ester or a mixed anhydride. The covalent bond is generally formed between the reactive entity and an amino group, a hydroxy group, or a thiol group on the blood component. The amino group preferably forms a covalent bond with reactive entities like carboxy, phosphoryl or acyl; the hydroxy group preferably forms a covalent bond with reactive entities like activated esters; and the thiol group preferably forms a covalent bond with reactive entities like esters or mixed anhydrides. The preferred blood component comprises mobile blood components like serum albumin, immunoglobulins, or combinations thereof, and the preferred reactive entity comprises anhydrides like maleimide groups. In a most preferred embodiment, the blood component is serum albumin.

[0028] The blood components are preferably mobile, which means that they do not have a fixed situs for any extended period of time, generally not exceeding 5 minutes, and more usually one minute. These blood components are not membrane-associated and are present in the blood for extended periods of time in a minimum concentration of at least 0.1 μg/ml. Preferred mobile blood components include serum albumin, transferrin, ferritin and immunoglobulins such as IgM and IgG. The half-life of mobile blood components is at least about 12 hours.

[0029] The present gastrointestinal tissue growth promoter derivative is a GLP-2 peptide, and therefore protective groups may be required during the synthesis process of the GLP-2 derivative. These protective groups are conventional in the field of peptide synthesis, and can be generically described as chemical moieties capable of protecting the peptide derivative from reacting with other functional groups. Various protective groups are available commercially, and examples thereof can be found in U.S. Pat. No. 5,493,007 which is hereby incorporated by reference. Typical examples of suitable protective groups include acetyl, fluorenylmethyloxycarbonyl (FMOC), t-butyloxycarbonyl (BOC), benzyloxycarbonyl (CBZ), etc. Table 1 provides both the three letter and one letter abbreviations for amino acids.

TABLE 1
NATURAL AMINO ACIDS AND THEIR ABBREVIATIONS

| | 3-letter | 1-letter |
|---|---|---|
| Name | abbreviation | abbreviation |
| Alanine | Ala | A |
| Arginine | Arg | R |
| Asparagine | Asn | N |
| Aspartic acid | Asp | D |
| Cysteine | Cys | C |
| Glutamic acid | Glu | E |
| Glutamine | Gln | Q |
| Glycine | Gly | G |
| Histidine | His | H |
| Isoleucine | Ile | I |
| Leucine | Leu | L |
| Lysine | Lys | K |
| Methionine | Met | M |
| Phenylalanine | Phe | F |
| Proline | Pro | P |
| Serine | Ser | S |
| Threonine | Thr | T |
| Tryptophan | Trp | W |
| Tyrosine | Tyr | Y |
| Valine | Val | V |

[0030] The present GLP-2 derivative forms a peptidase-stabilized peptide after conjugation to a blood component. It is also contemplated that one or more additional amino acids may be added or substituted to the peptide prior to addition of the reactive entity, to facilitate the coupling thereof to the peptide. Such addition or substitution may be made at the N-terminal, the C-terminal, or therebetween. The thus obtained peptide derivative may be administered to a subject, animal or human, such that conjugation with blood components occurs in vivo, or they may be first conjugated to blood components of the subject, animal or human, in vitro, and the resulting conjugate, or peptidase-stabilized peptide as defined below, administered to the subject.

[0031] Any amino acid, present, substituted with or added to, the GLP-2 sequence, may be D-amino acids or L-amino acids or combinations thereof. L-amino acids are generally preferred. A glycine substitution at position 2 of the native GLP-2 sequence represents a preferred embodiment, because it confers to the analog a greater resistance to DPP-IV enzyme. Glycine may also be replaced with D-alanine or proline for that same purpose. In addition, a N-α-methyl aspartic acid substitution at position 3 of the native GLP-2 sequence can achieve the same result, as well as other peptide mimetics such as methyl amino, hydroxyl ethyl, hydrazino, ethylene or sulfonamide as isosteric replacement of the amide bond.

[0032] The invention also includes GLP-2 fragments which, although containing a sequence that is substantially homologous to that of a naturally occurring GLP-2 peptide, may lack one or more additional amino acids at their amino and/or their carboxy termini that are naturally found on a GLP-2 native peptide. Thus, the invention pertains to polypeptide fragments of GLP-2 that may lack one or more amino acids that are normally present in a naturally occurring GLP-2 sequence provided that such polypeptides have gastrointestinal tissue growth promoting activity which preferably at least substantially equals that of GLP-2.

[0033] The invention also encompasses the obvious or trivial variants of the above-described analogs or fragments which have inconsequential amino acid substitutions (and thus have amino acid sequences which differ from that of the natural sequence) provided that such variants have gastrointestinal tissue growth promoting activity which is substantially similar to that of GLP-2. Examples of obvious or trivial substitutions include the substitution of one basic residue for another (i.e. Arg for Lys), the substitution of one hydrophobic residue for another (i.e. Leu for lie), or the substitution of one aromatic residue for another (i.e. Phe for Tyr), etc. Further, other trivial variants include analogs wherein conservative substitutions resulting in a substantial structural analogy of the original sequence are obtained. Examples of such conservative substitutions, without limitation, include glutamic acid for aspartic acid and vice-versa; glutamine for asparagine and vice-versa; serine for threonine and vice-versa; lysine for arginine and vice-versa; or any of isoleucine, valine or leucine for each other.

[0034] A peptidase-stabilized GLP-2 derivative is more stable in the presence of peptidases in vivo than the corresponding non-stabilized GLP-2 analog. The peptidase stability is determined by comparing the half-life of the native GLP-2 analog in serum or blood to the half-life of the corresponding derivative containing the reactive entity in serum or blood. Half-life is determined by sampling the serum or blood after administration of the derivative and the non-modified peptide, and determining the activity of each compound.

[0035] In greater details, the present invention is directed to the modification of GLP-2 and analogs and fragments thereof to improve its bioavailability, extend in vivo half-life and distribution through selective conjugation onto a blood component while substanitally maintaining or improving their remarkable therapeutic properties.

[0036] Human GLP-2 is known to have the following sequence:

His-Ala-Asp-Gly-Ser-Phe-Ser-Asp-Glu-Met-Asn-Thr-
Ile-Leu-Asp-Asn-Leu-Ala-Ala-Arg-Asp-Phe-Ile-Asn-
Trp-Leu-Ile-Gln-Thr-Lys-Ile-Thr-Asp.

[0037] The invention relates to therapeutic and related uses of GLP-2 derivatives having an extended half-life in vivo, particularly to
[0038] promote the growth of small and/or large intestine tissue;
[0039] elevate blood levels of GLP-2 derivative;
[0040] restore or maintain gastrointestinal function;
[0041] promote the healing and regrowth of injured or ulcerated/inflamed intestinal mucosa;
[0042] reduce the risk of enteric disease;
[0043] enhance the nutritional status;
[0044] treat or prevent nutritional or gastrointestinal disorders or diseases;
[0045] reduce weight loss;
[0046] reduce interleukin-1 expression;
[0047] increase colon length, both mucosal area and integrity in the colon, and crypt depth;
[0048] promote villous growth in subjects suffering from a disease such as celiac disease, post-infectious villous atrophy and short gut syndromes;
[0049] promote proliferation of the small and large intestine in a healthy subject, for example to enable increased absorption of nutrients in cattle allowing earlier weaning or increased milk and meat production; etc.

[0050] The effect on growth elicited by the present GLP-2 derivatives manifests as an increase in small bowel weight, relative to a mock-treated control. In particular, the present GLP-2 derivatives are considered to have “intestinotrophic” activity if, when assessed in the murine model exemplified herein, the analog mediates an increase in small bowel weight of at least 10% relative to a control animal receiving vehicle alone. Particularly suitable for therapeutic use are those derivatives which mediate an increase of at least 20% in small bowel weight, while those more preferred mediate an increase in small bowel weight of 50% or more. Intestinotrophic activity is noted most significantly in relation to the jejunum, including the distal jejunum and particularly the proximal jejunum, and is also noted in the ileum.

[0051] In addition to exhibiting intestinotrophic activity, the present GLP-2 derivatives incorporate an amino acid substitution at one or more sites within a GLP-2 peptide “backbone”, which is either a mammalian GLP-2 species per se, or is a variant of a mammalian GLP-2 species in which the C-terminus and/or the N-terminus has been altered by addition of one or two basic residues, or has been modified to incorporate a blocking group of the type used conventionally in the art of peptide chemistry to protect peptide termini from undesired biochemical attack and degradation in vivo. Thus, the present peptide derivatives incorporate an amino acid substitution in the context of any mammalian GLP-2 species, including but not limited to human GLP-2, bovine GLP-2, rat GLP-2, dog GLP-2, ox GLP-2, porcine GLP-2, guinea pig GLP-2 and hamster GLP-2, the sequences of which have been reported by many authors, including Buhl et al, J. Biol. Chem., 1988, 263(18):8621. In a more preferred embodiment, a lysine residue is added at the C-terminal of the GLP-2 peptide sequence.

[0052] In one aspect of the invention, the intestinotrophic analogs of GLP-2 suitable for derivatization according to the present invention are of the following sequence:

R₁-(Y₁)ₘ-X₁-X₂-X₃-X₄X₅-Phe₆-Ser₇-Asp₈-(P₁)-X₁₄-
Asp₁₅-X₁₆-X₁₇-X₁₈-X₁₉-X₂₀-X₂₁-Phe₂₂-(P₂)-Trp₂₅-
Leu₂₆-X₂₇-X₂₈-Thr₂₉-Lys₃₀-P₃-(Y₂)ₙ-R₂

wherein

[0053] X₁ is His or Tyr;

[0054] X₂ is Ala, Gly, D-Ala, Pro, Ile, Nor-Val, α-aminobutyric acid, or an Ala-replacement amino acid conferring on said analog resistance to DPP-IV enzyme;

[0055] X₃ is Asp, Glu, Pro HPro; or X₂—X₃ are X₂ψ(CH(OH)CH₂)X₃; X₂ψ(CH₂NH₂)X₃ or X₂ψ(CHCH)X₃ wherein X₂ and X₃ are as defined above;

[0056] X₄ is Gly or Ala;

[0057] X₅ is Ser or Ala;

[0058] P₁ is Glu-X₁₀-Asn-Thr-Ile, Gly-X₁₀-Asn-Thr-Val or Tyr-Ser-Lys-Tyr;

[0059] X₁₀ is Met, Leu, Ile or an oxidatively stable Met-replacement amino acid;

[0060] X₁₄ is Leu or Lys;

[0061] X₁₆ is Asn, Lys or Ala;

[0062] X₁₇ is Leu or Lys;

[0063] X₁₉ is Ala or Thr;

[0064] X₂₀ is Arg, Lys, His or Ala;

[0065] X₂₁ is Asp or Lys;

[0066] X₂₇ is He or Leu;

[0067] X₂₈ is Gln or His;

[0068] P₂ is Ile-Asn, Ile-Ala or Val-Gln;

[0069] P₃ is a covalent bond, or is Ile, Ile-Thr, Ile-Thr-Asp or Ile-Thr-Asn;

[0070] R₁ is NH2 or a N-terminal blocking group;

[0071] R₂ is COOH, CONH₂ or a C-terminal blocking group;

[0072] Y₁ is one or two of Arg, Lys, and His;

[0073] Y₂ is one or two of Arg, Lys, and His; and

[0074] m and n are independently 0 or 1.

[0075] In a preferred embodiment, X₁ is His; X₂ is Ala or Gly, X₃ is Asp; X₄ is Gly; X₅ is Ser; P₁ is Glu-X₁₀-Asn-Thr-Ile; X₁₀ is Met; X₁₆ is Asn or Lys; X₁₉ is Ala; X₂₀ is Arg; X₂₇ is Ile; X₂₈ is Gln; P₂ is Ile-Asn; P₃ is Ile-Thr-Asp, R₂ is CONH₂ and m is 0. In a further preferred embodiment, n is 1 and Y₂ is Lys.

[0076] In a preferred embodiment, the functionality on the protein will be a thiol group and the reactive entity will be a maleimide or maleimido-containing group such as γ-maleimide-butyrylamide (GMBA), maleimidopropionic acid (MPA), (2-amino)ethoxy acetic acid (AEA)-MPA, ethylenediamine (EDA)-MPA or 2-[2-2-amino)ethoxy)]ethoxy acetic acid (AEEA)-MPA and combinations thereof Examples of combinations include, without limitations, (AEEA-EDA)-MPA; (AEEA-AEEA)-MPA, (AEA-AEEA)-MPA and the like.

[0077] Maleimide groups are most selective for sulfhydryl groups on peptides when the pH of the reaction mixture is kept between 6.5 and 7.4. At pH 7.0, the rate of reaction of maleimido groups with sulfhydryls is 1000-fold faster than with amines. A stable thioether linkage between the maleimido group and the sulfhydryl is formed which cannot be cleaved under physiological conditions.

[0078] The gastrointestinal tissue growth promoter derivatives of the invention provide for specific labeling of blood components. Such specific labeling, particularly with a maleimide, offers several advantages. Free thiol groups are less abundant in vivo than amino groups, and as a result, maleimide derivatives covalently bond to fewer proteins. For example, in serum albumin, there is only one free thiol group per molecule. Thus, a GLP-2-maleimide-albumin conjugate will tend to comprise a 1:1 molar ratio of peptide to albumin. In addition to albumin, IgG molecules (class II) also have free thiols. Since IgG molecules and serum albumin make up the majority of soluble proteins in the blood, i.e., 99%, they also make up the majority of the free thiol groups available to covalently bond to a maleimide-substituted GLP-2.

[0079] Further, even among free thiol-containing blood proteins, specific labeling with a maleimide leads to the preferential formation of peptide maleimide-albumin conjugates, due to the unique characteristics of albumin itself. The single free thiol group of albumin, highly conserved among species, is located at amino acid residue Cys₃₄. It has been demonstrated recently that the Cys₃₄ of albumin has an increased reactivity relative to free thiols on other free thiol-containing proteins. This is due in part to the unusual pK value of 5.5 for the Cys₃₄ of albumin. This is much lower than typical pK values for cysteines residues in general, which are typically about 8. Due to this low pK, under normal physiological conditions, Cys₃₄ of albumin is predominantly in the anionic form, which dramatically increases its reactivity. In addition to the low pK value of Cys₃₄, another factor which enhances the reactivity of Cys₃₄ is its location, which is in a hydrophobic pocket close to the surface of one loop of region V of albumin. This location makes Cys₃₄ accessible to ligands of all kinds, and is an important factor in Cys₃₄'s biological role as free radical trap and free thiol scavenger. As a result, the reaction rate acceleration can be as much as 1000-fold relative to rates of reaction of peptide-maleimides with other free-thiol containing proteins.

[0080] Another advantage of peptide-maleimide-albumin conjugates is the reproducibility associated with the 1:1 loading of peptide to albumin specifically at Cys₃₄. Conventional activation techniques, such as with glutaraldehyde, DCC, EDC and other chemical activators of, for example, free amines, lack this selectivity. For example, albumin contains 52 lysine residues, 25-30 of which are located on the surface of albumin and accessible for conjugation. Activating these lysine residues, or alternatively modifying a peptide to couple through these lysine residues, results in a heterogeneous population of conjugates. Even if an equimolar ratio peptide:albumin (i.e., 1:1) is employed, the end result is the production of random conjugation products, some containing an indefinite number of peptides linked to each molecule of albumin, and each conjugate having peptides randomly coupled at any one of the 25-30 available lysine sites. Consequently, characterization of the exact composition is virtually impossible, not to mention the absence of reproducibility. Additionally, while it would seem that conjugation through lysine residues of albumin would at least have the advantage of delivering more therapeutic agent per albumin molecule, studies have shown that a 1:1 ratio of therapeutic agent to albumin is preferred. In an article by Stehle, et al. in Anti-Cancer Drugs, 1997 8, 677-685, which is incorporated herein in its entirety, it is reported that a 1:1 ratio of the anti-cancer methotrexate to albumin conjugated via glutaraldehyde gave the most promising results. These conjugates were taken up by tumor cells, whereas conjugates bearing 5:1 to 20:1 methotrexate molecules had altered HPLC profiles and were quickly taken up by the liver in vivo. It would therefore seems that at higher ratios, the effectiveness of albumin as a carrier for a therapeutic agent is diminished.

[0081] Through controlled administration of the present GLP-2 peptide derivative, and particularly a GLP-2 peptide comprising a maleimide reactive entity, specific in vivo labeling or bonding of albumin and IgG can be controlled. In typical administrations, it has been shown that 80-90% of the administered peptide derivative bonds to albumin and less than 5% bonds to IgG. Trace bonding of free thiols present, such as glutathione, also occurs. Such specific bonding is preferred for in vivo use as it permits an accurate calculation of the estimated half-life of the therapeutic agent administered.

[0082] Maleimide-substituted GLP-2 peptides are generally quite stable in the presence of aqueous solutions and in the presence of free amines. Because maleimide-substituted GLP-2 peptides react with free thiols, protective groups are not necessary to prevent them from reacting with themselves.

[0083] As stated above, the desired conjugates of GLP-2 derivatives to blood components may be prepared in vivo by administration of the derivatives directly to the subject, which may be an animal or a human. The administration may be done in the form of a bolus, or introduced slowly over time by infusion using metered flow or the like.

[0084] Alternately, the conjugate may also be prepared ex vivo by combining blood or commercially available purified blood components with the present GLP-2 derivative, allowing covalent bonding of the GLP-2 derivative to the functionalities on blood components, and then returning or administering the conjugated blood or conjugated purified blood component to the host. Moreover, the above may also be accomplished by first purifying an individual blood component or limited number of components, such as red blood cells, immunoglobulins, serum albumin, or the like, and combining the component or components ex vivo with the present compound derivative. The labeled blood or blood component may then be returned to the subject to provide in vivo the therapeutically effective conjugates. The blood also may be treated to prevent coagulation during handling ex vivo.

Peptide Synthesis

[0085] GLP-2 peptides may be synthesized by standard methods of solid phase peptide chemistry well known to any one of ordinary skill in the art. For example, the peptide may be synthesized by solid phase chemistry techniques following the procedures described by Steward et al. in Solid Phase Peptide Synthesis, 2nd Ed., Pierce Chemical Company, Rockford, Ill., (1984) using a Rainin PTI Symphony™ synthesizer. Similarly, peptides fragments may be synthesized and subsequently combined or linked together to form a larger peptide (segment condensation). These synthetic peptide fragments can also be made with amino acid substitutions and/or deletion at specific locations.

[0086] For solid phase peptide synthesis, a summary of the many techniques may be found in Stewart et al. in “Solid Phase Peptide Synthesis”, W. H. Freeman Co. (San Francisco), 1963 and Meienhofer, Hormonal Proteins and Peptides, 1973, 2 46. For classical solution synthesis, see for example Schroder et al. in “The Peptides”, volume 1, Acacemic Press (New York). In general, such method comprises the sequential addition of one or more amino acids or suitably protected amino acids to a growing peptide chain on a polymer. Normally, either the amino or carboxyl group of the first amino acid is protected by a suitable protecting group. The protected and/or derivatized amino acid is then either attached to an inert solid support or utilized in solution by adding the next amino acid in the sequence having the complimentary (amino or carboxyl) group suitably protected and under conditions suitable for forming the amide linkage. The protecting group is then removed from this newly added amino acid residue and the next amino acid (suitably protected) is added, and so forth.

[0087] After all the desired amino acids have been linked in the proper sequence, any remaining protecting groups (and any solid support) are cleaved sequentially or concurrently to afford the final peptide. By simple modification of this general procedure, it is possible to add more than one amino acid at a time to a growing chain, for example, by coupling (under conditions which do not racemize chiral centers) a protected tripeptide with a properly protected dipeptide to form, after deprotection, a pentapeptide (segment condensation).

[0088] A particularly preferred method of preparing the present GLP-2 derivatives involves solid phase peptide synthesis wherein the amino acid α-N-terminal is protected by an acid or base sensitive group. Such protecting groups should have the properties of being stable to the conditions of peptide linkage formation while being readily removable without destruction of the growing peptide chain or racemization of any of the chiral centers contained therein. Examples of N-protecting groups and carboxy-protecting groups are disclosed in Greene, “Protective Groups In Organic Synthesis,” (John Wiley & Sons, New York pp. 152-186 (1981)), which is hereby incorporated by reference. Examples of N-protecting groups comprise, without limitation, loweralkanoyl groups such as formyl, acetyl (“Ac”), propionyl, pivaloyl, t-butylacetyl and the like; other acyl groups include 2-chloroacetyl, 2-bromoacetyl, trifluoroacetyl, trichloroacetyl, phthalyl, o-nitrophenoxyacetyl, -chlorobutyryl, benzoyl, 4-chlorobenzoyl, 4-bromobenzoyl, 4-nitrobenzoyl and the like; sulfonyl groups such as benzenesulfonyl, p-toluenesulfonyl, o-nitrophenylsulfonyl, 2,2,5,7,8-pentamethylchroman-6-sulfonyl (pmc), and the like; carbamate forming groups such as t-amyloxycarbonyl, benzyloxycarbonyl, p-chlorobenzyloxycarbonyl, p-methoxybenzyloxycarbonyl, p-nitrobenzyloxycarbonyl, 2-nitrobenzyloxycarbonyl, p-bromobenzyloxycarbonyl, 3,4-dimethoxybenzyloxycarbonyl, 3,5-dimethoxybenzyloxycarbonyl, 2,4-dimethoxybenzyloxycarbonyl, 4-ethoxybenzyloxycarbonyl, 2-nitro4,5-dimethoxybenzyloxycarbonyl, 3,4,5-trimethoxybenzyloxycarbonyl, 1-(p-biphenylyl)-1-methylethoxycarbonyl, α,α-dimethyl-3,5-dimethoxybenzyloxycarbonyl, benzhydryloxycarbonyl, t-butyloxycarbonyl (boc), diisopropylmethoxycarbonyl, isopropyloxycarbonyl, ethoxycarbonyl, methoxycarbonyl, allyloxycarbonyl, 2,2,2,-trichloroethoxycarbonyl, phenoxycarbonyl, 4-nitrophenoxycarbonyl, fluorenyl-9-methoxycarbonyl, isobornyloxycarbonyl, cyclopentyloxycarbonyl, adamantyloxycarbonyl, cyclobexyloxycarbonyl, phenylthiocarbonyl and the like; arylalkyl groups such as benzyl, biphenylisopropyloxycarbonyl, triphenylmethyl, benzyloxymethyl, 9-fluorenylmethyloxycarbonyl (Fmoc) and the like and silyl groups such as trimethylsilyl and the like. Preferred α-N-protecting group are o-nitrophenylsulfenyl; 9-fluorenylmethyloxycarbonyl; t-butyloxycarbonyl (boc), isobornyloxycarbonyl; 3,5-dimethoxybenzyloxycarbonyl; t-amyloxycarbonyl; 2-cyano-t-butyloxycarbonyl, and the like, 9-fluorenyl-methyloxycarbonyl (Fmoc) being more preferred, while preferred side chain N-protecting groups comprise 2,2,5,7,8-pentamethylchroman-6-sulfonyl (pmc), nitro, p-toluenesulfonyl, 4-methoxybenzene-sulfonyl, Cbz, Boc, and adamantyloxycarbonyl for side chain amino groups like lysine and arginine; benzyl, o-bromobenzyloxycarbonyl, 2,6-dichlorobenzyl, isopropyl, t-butyl (t-Bu), cyclohexyl, cyclopenyl and acetyl (Ac) for tyrosine; t-butyl, benzyl and tetrahydropyranyl for serine; trityl, benzyl, Cbz, p-toluenesulfonyl and 2,4-dinitrophenyl for histidine; formyl for tryptophan; benzyl and t-butyl for aspartic acid and glutamic acid; and triphenylmethyl (trityl) for cysteine.

[0089] A carboxy-protecting group conventionally refers to a carboxylic acid protecting ester or amide group. Such carboxy protecting groups are well known to those skilled in the art, having been extensively used in the protection of carboxyl groups in the penicillin and cephalosporin fields as described in U.S. Pat. No. 3,840,556 and 3,719,667, the disclosures of which are hereby incorporated herein by reference. Representative carboxy protecting groups comprise, without limitation, C₁-C₈ loweralkyl; arylalkyl such as phenethyl or benzyl and substituted derivatives thereof such as alkoxybenzyl or nitrobenzyl groups; arylalkenyl such as phenylethenyl; aryl and substituted derivatives thereof such as 5-indanyl; dialkylaminoalkyl such as dimethylaminoethyl; alkanoyloxyalkyl groups such as acetoxymethyl, butyryloxymethyl, valeryloxymethyl, isobutyryloxymethyl, isovaleryloxymethyl, 1-(propionyloxy)-1-ethyl, 1-(pivaloyloxyl)-1-ethyl, 1-methyl-1(propionyloxy)-1-ethyl, pivaloyloxymethyl, propionyloxymethyl; cycloalkanoyloxyalkyl groups such as cyclopropylcarbonyloxymethyl, cyclobutylcarbonyloxymethyl, cyclopentylcarbonyloxymethyl, cyclohexylcarbonyloxy-methyl; aroyloxyalkyl such as benzoyloxymethyl, benzoyloxyethyl; arylalkylcarbonyloxyalkyl such as benzylcarbonyloxymethyl, 2-benzylcarbonyloxyethyl; alkoxycarbonylalkyl or cycloalkyloxycarbonylalkyl such as methoxycarbonylmethyl, cyclohexyloxycarbonylmethyl, 1-methoxycarbonyl-1-ethyl; alkoxycarbonyloxyalkyl or cycloalkyloxycarbonyloxyalkyl such as methoxycarbonyloxymethyl, t-butyloxycarbonyl-oxymethyl, 1-ethoxycarbonyloxy-1-ethyl, 1-cyclohexyloxycarbonyloxy-1-ethyl; aryloxy-carbonyloxyalkyl such as 2-(phenoxycarbonyloxy)ethyl, 2-(5-indanyloxycarbonyloxy)-ethyl; alkoxyalkylcarbonyloxyalkyl such as 2-(1-methoxy-2-methylpropan-2-oyloxy)-ethyl; arylalkyloxycarbonyloxyalkyl such as 2-(benzyloxycarbonyloxy)ethyl; arylalkenyloxycarbonyloxyalkyl such as 2-(3-phenylpropen-2-yloxycarbonyloxy)ethyl; alkoxycarbonylaminoalkyl such as t-butyloxycarbonylaminomethyl; alkylaminocarbonyl-aminoalkyl such as methylaminocarbonylaminomethyl; alkanoylaminoalkyl such as acetylaminomethyl; heterocycliccarbonyloxyalkyl such as 4-methylpiperazinyl-carbonyloxymethyl; dialkylaminocarbonylalkyl such as dimethylaminocarbonylmethyl, diethylaminocarbonylmethyl; (5-(loweralkyl)-2-oxo-1,3-dioxolen4-yl)alkyl such as (5-t-butyl-2-oxo-1,3-dioxolen4-yl)methyl; and (5-phenyl-2-oxo-1,3-dioxolen4-yl)alkyl such as (5-phenyl-2-oxo-1,3-dioxolen4-yl)methyl. Representative amide carboxy protecting groups comprise, without limitation, aminocarbonyl and loweralkylaminocarbonyl groups. Of the above carboxy-protecting groups, loweralkyl, cycloalkyl or arylalkyl ester, for example, methyl ester, ethyl ester, propyl ester, isopropyl ester, butyl ester, sec-butyl ester, isobutyl ester, amyl ester, isoamyl ester, octyl ester, cyclohexyl ester, phenylethyl ester and the like or an alkanoyloxyalkyl, cycloalkanoyloxyalkyl, aroyloxyalkyl or an arylalkylcarbonyloxyalkyl ester are preferred. Preferred amide carboxy protecting groups are loweralkylaminocarbonyl groups.

[0090] In the solid phase peptide synthesis method, the α-C-terminal amino acid is attached to a suitable solid support or resin. Suitable solid supports useful for the above synthesis are those materials that are inert to the reagents and reaction conditions of the stepwise condensation-deprotection reactions, as well as being insoluble in the media used. The preferred solid support for synthesis of α-C-terminal carboxy peptides is 4-hydroxymethylphenoxyacetyl-4′-methylbenzyhydrylamine resin (HMP resin). The preferred solid support for α-C-terminal amide peptides Fmoc-protected Ramage Resin.

[0091] When the solid support is 4-2′,4′-dimethoxyphenyl-Fmoc-aminomethyl)-phenoxy-acetamidoethyl resin, the Fmoc group is cleaved with a secondary amine, preferably piperidine, prior to coupling with the α-C-terminal amino acid as described above. The preferred method for coupling to the deprotected 4-2′,4′-dimethoxyphenyl-Fmoc-aminomethyl)phenoxy-acetamidoethyl resin is O-benzotriazol-1-yl-N,N,N′,N′-tetramethyluroniumhexafluoro-phosphate (HBTU, 1 equiv.), diisopropylethylamine (DIEA, 1 equiv.), and optionally 1-hydroxybenzotriazole (HOBT, 1 equiv.), in DMF. The coupling of successive protected amino acids can be carried out in an automatic polypeptide synthesizer in a conventional manner as is well known in the art.

[0092] The removal of the Fmoc protecting group from the α-N-terminal side of the growing peptide is accomplished conventionally, for example, by treatment with a secondary amine, preferably piperidine. Each protected amino acid is then introduced in about 3-fold molar excess, and the coupling is preferably carried out in DMF. The coupling agent is normally O-benzotriazol-1-yl-N,N,N′,N′-tetramethyluroniumhexafluoro-phosphate (HBTU, 1 equiv.), diisopropylethylamine (DIEA, 1 equiv.), and optionally 1-hydroxybenzotriazole (HOBT, 1 equiv.).

[0093] At the end of the solid phase synthesis, the peptide is removed from the resin and deprotected, either in successive operations or in a single operation. Removal of the polypeptide and deprotection can be accomplished conventionally in a single operation by treating the resin-bound polypeptide with a cleavage reagent comprising thioanisole, triisopropylsilane, phenol, and trifluoroacetic acid. In cases wherein the α-C-terminal of the polypeptide is an alkylamide, the resin is cleaved by aminolysis with an alkylamine. Alternatively, the peptide may be removed by transesterification, e.g. with methanol, followed by aminolysis or by direct transamidation. The protected peptide may be purified at this point or taken to the next step directly. The removal of the side chain protecting groups is accomplished using the cleavage mixture described above. The fully deprotected peptide can be purified by a sequence of chromatographic steps employing any or all of the following types: ion exchange on a weakly basic resin (acetate form); hydrophobic adsorption chromatography on underivatized polystyrene-divinylbenzene (such as Amberlite XAD™); silica gel adsorption chromatography, ion exchange chromatography on carboxymethylcellulose; partition chromatography, e.g. on Sephadex G-25™, LH-20™ or countercurrent distribution; high performance liquid chromatography (HPLC), especially reverse-phase HPLC on octyl- or octadecylsilyl-silica bonded phase column packing. Anyone of ordinary skill in the art will be able to determine easily what would be the preferred chromatographic steps or sequences required to obtain acceptable purification of the GLP-2 peptide.

[0094] Molecular weights of these peptides are determined using Quadrupole Electro Spray mass spectroscopy.

[0095] The synthesis process for the production of the GLP-2 derivatives of the present invention will vary widely, depending upon the nature of the various elements, i.e., the GLP-2 sequence, the linking group and the reactive entity, comprised in the GLP-2 derivative. The synthetic procedures are selected to ensure simplicity, high yields and repetitivity, as well as to allow for a highly purified product. Normally, the chemically reactive entity will be coupled at the last stage of the synthesis, for example, with a carboxyl group, esterification to form an active ester. Specific methods for the production of the present GLP-2 derivatives are described below.

[0096] It is imperative that the chemically reactive entity be placed at a site to allow the peptide to covalently bond to the blood component while retaining a substantial proportion, if not all, activity and/or beneficial effects of the corresponding native GLP-2 peptide.

[0097] In a more preferred embodiment, each GLP-2 derivative will be synthesized according to the following criteria: if a terminal carboxylic group is available on the peptide and is not critical for the retention of pharmacological activity, and no other sensitive functional group is present on the peptide, then the carboxylic acid will be chosen as attachment point for the linking group-reactive entity modification. If the terminal carboxylic group is involved in pharmacological activity, or if no carboxylic acids are available, then any other sensitive functional group not critical for the retention of pharmacological activity will be selected as the attachment point for the linking group-reactive entity modification. If several sensitive functional groups are available on a peptide, a combination of protecting groups will be used in such a way that after addition of the linking group/reactive entity and deprotection of all the protected sensitive functional groups, retention of pharmacological activity is still obtained. If no sensitive functional groups are available on the peptide, synthetic efforts will allow for a modification of the original peptide in such a way that retention of biological activity and retention of receptor or target specificity is obtained. In this case the modification should preferably occur at the opposite end of the peptide.

[0098] According to the present invention, the GLP-2 derivatives can be administered o patients that would benefit from growth of the tissue of the upper gastrointestinal tract In addition, patients who would benefit from increased upper gastrointestinal tract tissue function, whether as a result of increased tissue growth or not, are candidates for treatment with the invention. In general, patients who would benefit from either increased upper gastrointestinal tract mass and/or increased upper gastrointestinal tract mucosal function are candidates for treatment with the present GLP-2 peptide derivatives. Particular conditions that may be treated with the present GLP-2 peptide derivatives include the various forms of inflammatory diseases of the stomach or esophagus, as well as patients who have undergone partial or sub-total resection of the upper gastrointestinal tract. A non-exhaustive list of conditions of the upper gastrointestinal tract including the stomach and esophagus, that may be treated by the present GLP-2 derivatives or mixtures thereof, comprises disorders of the stomach like acute gastritis, acute hemorrhagic gastritis, acute stress gastritis, viral gastritis, parasitic gastritis, fungal gastritis, gastropathy (acute), hemorrhagic gastropathy, acute helicobacter pylori gastritis, type A, B or C gastritis, hypersecretory gastritis, non specific gastritis secondary to Helicobacter pylori, Helicobacter pylori-associated gastritis, chemical gastritis, reactive gastritis, reflux gastritis, bile gastritis, metaplastic atrophic gastritis and environmental metaplastic atrophic gastritis, idiopathic pangastritis, diffuse corporal gastritis, autoimmune chronic gastritis and autoimmune-associated gastritis, bacterial gastritis other than helicobacter pilori (Gastrospirillum hominis, phlegmonous, mycobacterial, syphiltic), postantrectomy atrophic gastitis, eosinophilic gastritis, and any other acute infectious gastritis; Crohn's disease, sarcoidosis, isolated granulomatous gastritis, lymphocylic gastritis, Menetriere's disease, etc., and disorders of the esophagus like infectious esophagitis from fungi like Candida species (esp. albicans), Aspargillus sp., Histoplasma capsulatum, Blastomyces dermatitides, or from viruses like herpes simplex virus (type 1), cytomegalovirus, Varicella-zoster virus, or from bacteria like Mycobacterium tuberculosis, Actinomyces Israelii, Streptococcus viridans, Lactobacillus acidophilus, and Treponema pallidum. Other disorders of the esophagus include, without limitation, non-infectious esophagitis, acid reflux, bile reflux, chemical injury (caused by medicines, toxins, acids, alkali etc.), sarcoidosis, Crohn's disease, Behcet's disease, Graft-versus-host disease, AIDS Related Infections (Cryptosporidium sp., Microsporidium sp., Isospora beill, Glardia Lamblia, Salmonella sp., Shigella sp., Campylobacter sp., Mycobacterium tuberculosis, Mycobacterium avium complex, Clostridium difficile, Cytomeglavorius and Herpes simplex.

[0099] Other diseases or conditions that can be treated with the present GLP-2 peptide derivatives include abnormalities in the small intestinal tract mucosa, which include ulcers and inflammatory disorders; congenital or acquired digestion and absorption disorders including malabsorption syndromes; and diseases and conditions caused by loss of small intestine mucosal function particularly in patients undergoing extended parenteral feeding or who, as a result of surgery, have undergone resection of the small intestine and suffer from short-gut syndrome and cul-de-sac syndrome. In general, patients who would benefit from either increased small intestinal mass and consequent increased small intestine mucosal function are candidates for treatment with GLP-2 peptide derivatives. Particular conditions that may be treated with the present GLP-2 derivatives include the various forms of sprue including celiac sprue which results from a toxic reaction to gliadin from wheat, and is marked by a tremendous loss of villae of the small intestine; tropical sprue which results from infection and is marked by partial flattening of the villae; hypogammaglobulinemic sprue which is observed commonly in patients with common variable immunodeficiency or hypogammaglobulinemia and is marked by significant decrease in villus height. Other conditions that may be treated with the present derivatives, or for which they may be useful prophylactically, include radiation enteritis, infectious or post-infectious enteritis, regional enteritis (Crohn's disease), small intestinal damage due to toxic or other chemotherapeutic agents, and patients with short bowel syndrome.

[0100] In another aspect, patient candidates for treatment with the present GLP-2 peptide derivatives are those who would benefit from growth of pancreatic islets, and particularly from proliferation or regeneration of pancreatic islets. Such patients include those suffering from diseases or conditions marked by the absence or reduction of pancreatic islets or by reduced pancreatic islet function. Particular patient candidates are those suffering from type 1 or type 2 diabetes, as well as patients with secondary forms of diabetes due to infiltration, inflammation or destruction of the pancreas.

[0101] The present GLP-2 derivatives may be used alone or in combination to optimize their therapeutic effects. They can be administered in a physiologically acceptable medium, e.g. deionized water, phosphate buffered saline (PBS), saline, aqueous ethanol or other alcohol, plasma, proteinaceous solutions, mannitol, aqueous glucose, alcohol, vegetable oil, or the like. Other additives which may be included include buffers, where the media are generally buffered at a pH in the range of about 5 to 10, where the buffer will generally range in concentration from about 50 to 250 mM, salt, where the concentration of salt will generally range from about 5 to 500 mM, physiologically acceptable stabilizers, and the like. The compositions may be lyophilized for convenient storage and transport.

[0102] The present peptide derivatives may be administered orally, parenterally, such as intravascularly (IV), intraarterially (IA), intramuscularly (IM), subcutaneously (SC), or the like. Administration may in appropriate situations be by transfusion. In some instances, where reaction of the functional group is relatively slow, administration may be oral, nasal, rectal, transdermal or aerosol, where the nature of the conjugate allows for transfer to the vascular system. Usually a single injection will be employed although more than one injection may be used, if desired. The peptide derivative may be administered by any convenient means, including syringe, trocar, catheter, or the like. The particular manner of administration will vary depending upon the amount to be administered, whether a single bolus or continuous administration, or the like. Preferably, the administration will be intravascularly, where the site of introduction is not critical to this invention, preferably at a site where there is rapid blood flow, e.g., intravenously, peripheral or central vein. Other routes may find use where the administration is coupled with slow release techniques or a protective matrix. The intent is that the peptides be effectively distributed in the blood, so as to be able to react with the blood components. The concentration of the conjugate will vary widely, generally ranging from about 1 μg/ml to 50 mg/ml. Typically, the total administered intravascularly may generally be in the range of about 0.1 mg/ml to about 10 mg/ml, more usually about 1 mg/ml to about 5 mg/ml.

[0103] By bonding to long lived components of the blood, such as immunoglobulin, serum albumin, red blood cells and platelets, a number of advantages ensue. The activity of the present GLP-2 derivatives is extended for days, and potentially up to weeks. Only one administration needs to be given during this period of time. Greater specificity can be achieved, since the active compound will be primarily bonded to large molecules, where it is less likely to be taken up intracellularly to interfere with other physiological processes.

[0104] The blood of the mammalian host may be monitored for the activity of GLP-2 and/or presence of the GLP-2 derivatives. By taking a blood sample from the host at different times, one may determine whether the GLP-2 peptide has become bonded to the long-lived blood components in sufficient amount to be therapeutically active and, thereafter, the level of GLP-2 in the blood. If desired, one may also determine to which of the blood components the GLP-2 peptide is covalently bonded. For specific maleimide-substituted peptides, it is much simpler to calculate the half-life of serum albumin and IgG. Monitoring may also take place by using assays of peptide activity, HPLC-MS or antibodies directed to peptides.

[0105] Another aspect of this invention relates to methods for determining the concentration of the GLP-2 peptide or its conjugate in biological samples (such as blood) using antibodies specific to the GLP-2 peptide and to the use of such antibodies as a treatment for toxicity potentially associated with such GLP-2 peptide or conjugate. This is advantageous because the increased stability and life of the GLP-2 peptide in vivo in the patient might lead to novel problems during treatment, including increased possibility for toxicity. The use of anti-GLP-2 antibodies, either monoclonal or polyclonal, having specificity for GLP-2, can assist in mediating any such problem. The antibody may be generated or derived from a host immunized with the particular GLP-2 derivative, or with an immunogenic fragment of the agent, or a synthesized immunogen corresponding to an antigenic determinant of the agent. Preferred antibodies will have high specificity and affinity for native, derivatized and conjugated forms of the GLP-2 peptide derivative. Such antibodies can also be labeled with enzymes, fluorochromes, or radiolabels.

[0106] Antibodies specific for the GLP-2 derivatives may be produced by using purified GLP-2 peptides for the induction of derivatized GLP-2-specific antibodies. By induction of antibodies, it is intended not only the stimulation of an immune response by injection into animals, but analogous steps in the production of synthetic antibodies or other specific binding molecules such as screening of recombinant immunoglobulin libraries. Both monoclonal and polyclonal antibodies can be produced by procedures well known in the art.

[0107] The antibodies may also be used to monitor the presence of the GLP-2 peptide in the blood stream. Blood and/or serum samples may be analyzed by SDS-PAGE and western blotting. Such techniques permit the analysis of the blood or serum to determine the bonding of the GLP-2 derivative to blood components.

[0108] The anti-therapeutic agent antibodies may also be used to treat toxicity induced by administration of the GLP-2 derivative, and may be used ex vivo or in vivo. Ex vivo methods would include immuno-dialysis treatment for toxicity employing anti-therapeutic agent antibodies fixed to solid supports. In vivo methods include administration of anti-therapeutic agent antibodies in amounts effective to induce clearance of antibody-agent complexes.

[0109] The antibodies may be used to remove the GLP-2 derivatives and conjugates thereof, from a patient's blood ex vivo by contacting the blood with the antibodies under sterile conditions. For example, the antibodies can be fixed or otherwise immobilized on a column matrix and the patient's blood can be removed from the patient and passed over the matrix. The GLP-2 derivatives will bind to the antibodies and the blood containing a low concentration of GLP-2, then may be returned to the patient's circulatory system. The amount of GLP-2 derivative removed can be controlled by adjusting the pressure and flow rate. Preferential removal of the GLP-2 derivative from the serum component of a patient's blood can be effected, for example, by the use of a semipermeable membrane, or by otherwise first separating the serum component from the cellular component by ways known in the art prior to passing the serum component over a matrix containing the anti-therapeutic antibodies. Alternatively the preferential removal of GLP-2-conjugated blood cells, including red blood cells, can be effected by collecting and concentrating the blood cells in the patient's blood and contacting those cells with fixed anti-GLP-2 antibodies to the exclusion of the serum component of the patient's blood.

[0110] The anti-GLP-2 antibodies can be administered in vivo, parenterally, to a patient that has received the GLP-2 derivative or conjugates for treatment. The antibodies will bind the GLP-2 derivative and conjugates. Once bound, the GLP-2 activity will be hindered if not completely blocked thereby reducing the biologically effective concentration of GLP-2 derivative in the patient's bloodstream and minimizing harmful side effects. In addition, the bound antibody-GLP-2 complex will facilitate clearance of the GLP-2 derivative and conjugates from the patient's blood stream.

[0111] The following examples are provided to illustrate preferred embodiments of the invention and shall by no means be construed as limiting its scope. Unless indicated otherwise, optically active protected amino acids in the L-configuration were used.

Synthesis

[0112] The synthesis of the GLP-2 peptides and derivatives thereof was performed using an automated solid-phase procedure on a Symphony™ peptide synthesizer with manual intervention during the generation of the GLP-2 derivatives. The synthesis was performed on Fmoc-protected Ramage™ amide linker resin using Fmoc-protected amino acids. Coupling was achieved by using O-benzotriazol-1-yl-N,N,N′,N′-tetramethyl-uronium hexafluorophosphate (HBTU) as activator in N,N-dimethylformamide (DMF) solution and diisopropylethylamine (DIEA) as base. The Fmoc protective group was removed using 20% piperidine/DMF. When needed, a Boc-protected amino acid was used at the N-terminus in order to generate the free N_{α}-terminus after the peptide was cleaved from the resin. All amino acids used during the synthesis possessed the L-stereochemistry unless otherwise stated. Glass reaction vessels were Sigmacoted™ and used during the synthesis.

### EXAMPLE 1

[0113] His-Ala-Asp-Gly-Ser-Phe-Ser-Asp-Glu-Met-Asn-Thr-Ile-Leu-Asp-Asn-Leu-Ala-Ala-Arg-Asp-Phe-Ile-Asn-Trp-Leu-Ile-Gln-Thr-Lys-Ile-Thr-Asp-CONH₂

[0114] Step 1: Solid phase peptide synthesis was carried out on a 100 μmole scale. The following protected amino acids were sequentially added to resin: Fmoc-Asp(tBu)-OH, Fmoc-Thr(tBu)-OH, Fmoc-Ile-OH, Fmoc-Lys(Boc)-OH, Fmoc-Thr(tBu)-OH, Fmoc-Gln(Trt)-OH, Fmoc-Ile-OH, Fmoc-Leu-OH, Fmoc-Trp(Boc)-OH, Fmoc-Asn(Trt)-OH, Fmoc-Ile-OH, Fmoc-Phe-OH, Fmoc-Asp(tBu)-OH, Fmoc-Arg(Pbf)-OH, Fmoc-Ala-OH, Fmoc-Ala-OH, Fmoc-Leu-OH, Fmoc-Asn(Trt)-OH, Fmoc-Asp(tBu)-OH, Fmoc-Leu-OH, Fmoc-Ile-OH, Fmoc-Thr(tBu)-OH, Fmoc-Asn(Trt)-OH, Fmoc-Met-OH, Fmoc-Glu(tBu)-OH, Fmoc-Asp(tBu)-OH, Fmoc-Ser(tBu)-OH, Fmoc-Phe-OH, Fmoc-Ser(tBu)-OH, Fmoc-Gly-OH, Fmoc-Asp(tBu)-OH, Fmoc-Ala-OH, Boc-His(Boc)-OH. They were dissolved in N,N-dimethylformamide (DMF) and, according to the sequence, activated using O-benzotriazol-1-yl-N,N,N′,N′-tetramethyl-uronium hexafluorophosphate (HBTU) and diisopropylethylamine (DIEA). Removal of the Fmoc protecting group was achieved using a solution of 20% (V/V) piperidine in N,N-dimethylfornamide (DMF) for 20 minutes.

[0115] Step 2: The peptide was cleaved from the resin using 85% TFA/5% TIS/5% tbioanisole and 5% phenol, followed by precipitation by dry-ice cold (0-4° C.) Et₂O. The crude peptide was collected on a polypropylene sintered funnel, dried, redissolved in a 40% mixture of acetonitrile in water (0.1% TFA) and lyophilized to generate the corresponding crude material used in the purification process.

### EXAMPLE 2

[0116] MPA-His-Ala-Asp-Gly-Ser-Phe-Ser-Asp-Glu-Met-Asn-Thr-Ile-Leu-Asp-Asn-Leu-Ala-Ala-Arg-Asp-Phe-Ile-Asn-Trp-Leu-Ile-Gln-Thr-Lys-Ile-Thr-Asp -CONH₂

[0117] Step 1: Solid phase peptide synthesis was carried out on a 100 μmole scale. The following protected amino acids were sequentially added to resin: Fmoc-Asp(tBu)-OH, Fmoc-Thr(tBu)-OH, Fmoc-Ile-OH, Fmoc-Lys(Boc)-OH, Fmoc-Thr(tBu)-OH, Fmoc-Gln(Trt)-OH, Fmoc-Ile-OH, Fmoc-Leu-OH, Fmoc-Trp(Boc)-OH, Fmoc-Asn(Trt)-OH, Fmoc-Ile-OH, Fmoc-Phe-OH, Fmoc-Asp(tBu)-OH, Fmoc-Arg(Pbf)-OH, Fmoc-Ala-OH, Fmoc-Ala-OH, Fmoc-Leu-OH, Fmoc-Asn(Trt)-OH, Fmoc-Asp(tBu)-OH, Fmoc-Leu-OH, Fmoc-Ile-OH, Fmoc-Thr(tBu)-OH, Fmoc-Asn(Trt)-OH, Fmoc-Met-OH, Fmoc-Glu(tBu)-OH, Fmoc-Asp(tBu)-OH, Fmoc-Ser(tBu)-OH, Fmoc-Phe-OH, Fmoc-Ser(tBu)-OH, Fmoc-Gly-OH, Fmoc-Asp(tBu)-OH, Fmoc-Ala-OH, Fmoc-His(Trt)-OH, MPA-OH.

[0118] Step 2: This step was performed in the same manner as step 2 of Example 1.

### EXAMPLE 3

[0119] His-Ala-Asp-Gly-Ser-Phe-Ser-Asp-Glu-Met-Asn-Thr-Ile-Leu-Asp-Asn-Leu-Ala-Ala-Arg-Asp-Phe-Ile-Asn-Trp-Leu-Ile-Gln-Thr-Lys-Ile-Thr-Asp-Lys(MPA) -CONH₂

[0120] Step 1: This step was performed in the same manner as step 1 of Example 1 above, 10 except that the first amino acid added to the resin was Fmoc-Lys(Aloc)-OH.

[0121] Step 2: The selective deprotection of the Lys (Aloc) group was performed manually and accomplished by treating the resin with a solution of 3 eq of Pd(PPh₃)₄ dissolved in 5 mL of C₆H₆ :CHCl₃ (1:1): 2.5% NMM (v:v):5% AcOH (v:v) for 2 h. The resin is then washed with CHCl₃ (6×5 mL), 20% AcOH in DCM (6×5 mL), DCM (6×5 mL), and DMF (6×5 mL).

[0122] Step 3: The synthesis was then re-automated for the addition of the 3-maleimidopropionic acid. Between every coupling, the resin was washed 3 times with N,N-dimethylformamide (DMF) and 3 times with isopropanol.

[0123] Step 4: The peptide was cleaved from the resin using 85% TFA/5% TIS/5% thioanisole and 5% phenol, followed by precipitation by dry-ice cold (0-4° C.) Et₂O. The crude peptide was collected on a polypropylene sintered funnel, dried, redissolved in a 40% mixture of acetonitrile in water (0.1% TFA) and lyophilized to generate the corresponding crude material used in the purification process.

### EXAMPLE 4

[0124] His-Ala-Asp-Gly-Ser-Phe-Ser-Asp-Glu-Met-Asn-Thr-Ile-Leu-Asp-Lys(MPA)-Leu-Ala-Ala-Arg-Asp-Phe-Ile-Asn-Trp-Leu-Ile-Gln-Thr-Lys-Ile-Thr-Asp -CONH₂

[0125] Step 1: Solid phase peptide synthesis was carried out on a 100 μmole scale. The following protected amino acids were sequentially added to resin following the procedure described in step 1 of Example 1: Fmoc-Asp(tBu)-OH, Fmoc-Thr(tBu)-OH, Fmoc-Ile-OH, Fmoc-Lys(Boc)-OH, Fmoc-Thr(tBu)-OH, Fmoc-Gln(Trt)-OH, Fmoc-Ile-OH, Fmoc-Leu-OH, Fmoc-Trp(Boc)-OH, Fmoc-Asn(Trt)-OH, Fmoc-Ile-OH, Fmoc-Phe-OH, Fmoc-Asp(tBu)-OH, Fmoc-Arg(Pbf)-OH, Fmoc-Ala-OH-OH, Fmoc-Ala-OH-OH, Fmoc-Leu-OH, Fmoc-Lys(Aloc)-OH, Fmoc-Asp(tBu)-OH, Fmoc-Leu-OH, Fmoc-Ile-OH, Fmoc-Thr(tBu)-OH, Fmoc-Asn(Trt)-OH, Fmoc-Met-OH, Fmoc-Glu(tBu)-OH, Fmoc-Asp(tBu)-OH, Fmoc-Ser(tBu)-OH, Fmoc-Phe-OH, Fmoc-Ser(tBu)-OH, Fmoc-Gly-OH, Fmoc-Asp(tBu)-OH, Fmoc-Ala-OH-OH, Boc-His(Boc)-OH.

[0126] Steps 2-4: These steps were performed in the same manner as steps 2-4 of Example 3.

### EXAMPLE 5

[0127] His-Gly-Asp-Gly-Ser-Phe-Ser-Asp-Glu-Met-Asn-Thr-Ile-Leu-Asp-Asn-Leu-Ala-Ala-Arg-Asp-Phe-Ile-Asn-Trp-Leu-Ile-Gln-Thr-Lys-Ile-Thr-Asp-CONH₂

[0128] Step 1: Solid phase peptide synthesis was carried out on a 100 μmole scale. The following protected amino acids were sequentially added to resin following the procedure described in step 1 of Example 1: Fmoc-Asp(tBu)-OH, Fmoc-Thr(tBu)-OH, Fmoc-Ile-OH, Fmoc-Lys(Boc)-OH, Fmoc-Thr(tBu)-OH, Fmoc-Gln(Trt)-OH, Fmoc-Ile-OH, Fmoc-Leu-OH, Fmoc-Trp(Boc)-OH, Fmoc-Asn(Trt)-OH, Fmoc-Ile-OH, Fmoc-Phe-OH, Fmoc-Asp(tBu)-OH, Fmoc-Arg(Pbf)-OH, Fmoc-Ala-OH, Fmoc-Ala-OH, Fmoc-Leu-OH, Fmoc-Asn(Trt)-OH, Fmoc-Asp(tBu)-OH, Fmoc-Leu-OH, Fmoc-Ile-OH, Fmoc-Thr(tBu)-OH, Fmoc-Asn(Trt)-OH, Fmoc-Met-OH, Fmoc-Glu(tBu)-OH, Fmoc-Asp(tBu)OH, Fmoc-Ser(tBu)-OH, Fmoc-Phe-OH, Fmoc-Ser(tBu)-OH, Fmoc-Gly-OH, Fmoc-Asp(tBu)-OH, Fmoc-Gly-OH, Boc-His(Boc)-OH.

[0129] Step 2: This step was performed in the same manner as step 2 of Example 1.

### EXAMPLE 6

[0130] MPA-His-Gly-Asp-Gly-Ser-Phe-Ser-Asp-Glu-Met-Asn-Thr-Ile-Leu-Asp-Asn-Leu-Ala-Ala-Arg-Asp-Phe-Ile-Asn-Trp-Leu-Ile-Gln-Thr-Lys-Ile-Thr-Asp -CONH₂

[0131] Step 1: This step was performed in the same manner as step 1 as in Example 2 except that the alanine residue in position 2 has been replaced with a glycine.

[0132] Step 2: This step was performed in the same manner as step 2 of Example 1.

### EXAMPLE 7

[0133] His-Gly-Asp-Gly-Ser-Phe-Ser-Asp-Glu-Met-Asn-Thr-Ile-Leu-Asp-Lys(MPA)-Leu-Ala-Ala-Arg-Asp-Phe-Ile-Asn-Trp-Leu-Ile-Gln-Thr-Lys-Ile-Thr-Asp -CONH₂

[0134] Step 1: Solid phase peptide synthesis was carried out on a 100 μmole scale. The following protected amino acids were sequentially added to resin following the procedure described in step 1 of Example 1: Fmoc-Asp(tBu)-OH, Fmoc-Thr(tBu)-H, Fmoc-Ile-OH, Fmoc-Lys(Boc)-OH, Fmoc-Thr(tBu)-OH, Fmoc-Gln(Trt)-OH, Fmoc-Ile-OH, Fmoc-Leu-OH, Fmoc-Trp(Boc)-OH, Fmoc-Asn(Trt)-OH, Fmoc-Ile-OH, Fmoc-Phe-OH, Fmoc-Asp(tBu)-OH, Fmoc-Arg(Pbf)-OH, Fmoc-Ala-OH, Fmoc-Ala-OH, Fmoc-Leu-OH, Fmoc-Lys(Aloc)-OH, Fmoc-Asp(tBu)-OH, Fmoc-Leu-OH, Fmoc-Ile-OH, Fmoc-Thr(tBu)-OH, Fmoc-Asn(Trt)-OH, Fmoc-Met-OH, Fmoc-Glu(tBu)-OH, Fmoc-Asp(tBu)-OH, Fmoc-Ser(tBu)-OH, Fmoc-Phe-OH, Fmoc-Ser(tBu)-OH, Fmoc-Gly-H, Fmoc-Asp(tBu)-OH, Fmoc-Gly-OH, Boc-His(Boc)-OH.

[0135] Steps 2-4: These steps were performed in the same manner as steps 2-4 of Example 3.

### EXAMPLE 8

[0136] His-Gly-Asp-Gly-Ser-Phe-Ser-Asp-Glu-Met-Asn-Thr-Ile-Leu-Asp-Asn-Leu-Ala-Ala-Arg-Asp-Phe-Ile-Asn-Trp-Leu-Ile-Gln-Thr-Lys-Ile-Thr-Asp-Lys(MPA) -CONH₂

[0137] Step 1: This step was performed in the same mannner as step 1 of Example 5 above, except that the first amino acid added to the resin was Fmoc-Lys(Aloc)-OH.

[0138] Steps 2-4: These steps were performed in the same manner as steps 2-4 of Example 3.

### EXAMPLE 9

[0139] His-Gly-Asp-Gly-Ser-Phe-Ser-Asp-Glu-Met-Asn-Thr-Ile-Leu-Asp-Lys(AEEA-MPA)-Leu-Ala-Ala-Arg-Asp-Phe-Ile-Asn-Trp-Leu-Ile-Gln-Thr-Lys-Ile-Thr -Asp-CONH₂

[0140] Step 1: This step was performed in the same manner as step 1 of Example 7.

[0141] Step 2: The selective deprotection of the Lys (Aloc) group was performed manually and accomplished by treating the resin with a solution of 3 eq of Pd(PPh₃)₄ dissolved in 5 mL of C₆H₆ :CHCl₃ (1:1): 2.5% NMM (v:v):5% AcOH (v:v) for 2 h. The resin is then washed with CHCl₃ (6×5 mL), 20% AcOH in DCM (6×5 mL), DCM (6×5 mL), and DMF (6×5 mL).

[0142] Step 3: The synthesis was then re-automated for the addition of the Fmoc-AEEA-OH (Fmoc-aminoethoxyethoxy acetic acid). Between every coupling, the resin was washed 3 times with N,N-dimethylformamide (DMF) and 3 times with isopropanol. After proper deprotection, the MPA (3-maleimidopropionic acid) was anchored to the spacer and again the resin was washed 3 times with N,N-dimethylformamide (DMF) and 3 times with isopropanol.

[0143] Step 4: The peptide was cleaved from the resin using 85% TFA/5% TIS/5% thioanisole and 5% phenol, followed by precipitation by dry-ice cold (04° C) Et₂O. The crude peptide was collected on a polypropylene sintered funnel, dried, redissolved in a 40% mixture of acetonitrile in water (0.1% TFA) and lyophilized to generate the corresponding crude material used in the purification process.

### EXAMPLE 10

[0144] His-Gly-Asp-Gly-Ser-Phe-Ser-Asp-Glu-Met-Asn-Thr-Ile-Leu-Asp-Asn-Leu-Ala-Ala-Arg-Asp-Phe-Ile-Asn-Trp-Leu-Ile-Gln-Thr-Lys-Ile-Thr-Asp-Lys(AEEA -MPA)-CONH₂

[0145] Step 1: This step was performed in the same mannner as step 1 of Example 5 above, except that the first amino acid added to the resin was Fmoc-Lys(Aloc)-OH.

[0146] Steps 2-4: These steps were performed in the same manner as steps 2-4 of Example 9.

### EXAMPLE 11

[0147] MPA-AEEA-His-Gly-Asp-Gly-Ser-Phe-Ser-Asp-Glu-Met-Asn-Thr-Ile-Leu-Asp-Asn-Leu-Ala-Ala-Arg-Asp-Phe-Ile-Asn-Trp-Leu-Ile-Gln-Thr-Lys-Ile-Thr -Asp-CONH₂

[0148] Step 1: This step was performed in the same manner as step 1 of Example 6 except that Fmoc-AEEA-OH is added to the resin prior to MPA-OH at the end of the synthesis.

[0149] Step 2: This step was performed in the same manner as step 2 of Example 1.

### EXAMPLE 12

[0150] MPA-AEEA-His-Ala-Asp-Gly-Ser-Phe-Ser-Asp-Glu-Met-Asn-Thr-Ile-Leu-Asp-Asn-Leu-Ala-Ala-Arg-Asp-Phe-Ile-Asn-Trp-Leu-Ile-Gln-Thr-Lys-Ile-Thr-Asp -CONH₂

[0151] Step 1: This step was performed in the same manner as step 1 of Example 1 except that Fmoc-AEEA-OH is added to the resin prior to MPA-OH at the end of the synthesis.

[0152] Step 2: This step was performed in the same manner as step 2 of Example 1.

### EXAMPLE 13

[0153] His-Ala-Asp-Gly-Ser-Phe-Ser-Asp-Glu-Met-Asn-Thr-Ile-Leu-Asp-Asn-Leu-Ala-Ala-Arg-Asp-Phe-Ile-Asn-Trp-Leu-Ile-Gln-Thr-Lys-Ile-Thr-Asp-Lys(AEEA -MPA)-CONH₂

[0154] Step 1: This step was performed in the same mannner as step 1 of Example 1 above, except that the first amino acid added to the resin was Fmoc-Lys(Aloc)-OH.

[0155] Steps 2-4: These steps were performed in the same manner as steps 2-4 of Example 9.

### EXAMPLE 14

[0156] His-Ala-Asp-Gly-Ser-Phe-Ser-Asp-Glu-Met-Asn-Thr-Ile-Leu-Asp-Lys(AEEA-MPA)-Leu-Ala-Ala-Arg-Asp-Phe-Ile-Asn-Trp-Leu-Ile-Gln-Thr-Lys-Ile-Thr -Asp-CONH₂

[0157] Step 1: This step was performed in the same mannner as step 1 of Example 4.

[0158] Steps 2-4: These steps were performed in the same manner as steps 2-4 of Example 9.

### EXAMPLE 15

[0159] His-Ala-Asp-Gly-Ser-Phe-Ser-Asp-Glu-Met-Asn-Thr-Ile-Leu-Asp-Asn-Lys(PA)-Ala-Ala-Arg-Asp-Phe-Ile-Asn-Trp-Leu-Ile-Gln-Thr-Lys-Ile-Thr-Asp -CONH₂

[0160] Step 1: Solid phase peptide synthesis was carried out on a 100 μmole scale. The following protected amino acids were sequentially added to resin following the procedure described in step 1 of Example 1: Fmoc-Asp(tBu)-OH, Fmoc-Thr(tBu)-OH, Fmoc-Ile-OH, Fmoc-Lys(Boc)-OH, Fmoc-Thr(tBu)-OH, Fmoc-Gln(Trt)-OH, Fmoc-Ile-OH, Fmoc-Leu-OH, Fmoc-Trp(Boc)-OH, Fmoc-Asn(Trt)-OH, Fmoc-Ile-OH, Fmoc-Phe-OH, Fmoc-Asp(tBu)-OH, Fmoc-Arg(Pbf)-OH, Fmoc-Ala-OH, Fmoc-Ala-OH, Fmoc-Lys(Aloc)-OH, Fmoc-Asn(Trt)-OH, Fmoc-Asp(tBu)-OH, Fmoc-Leu-OH, Fmoc-Ile-OH, Fmoc-Thr(tBu)-OH, Fmoc-Asn(Trt)-OH, Fmoc-Met-OH, Fmoc-Glu(tBu)-OH, Fmoc-Asp(tBu)-OH, Fmoc-Ser(tBu)-OH, Fmoc-Phe-OH, Fmoc-Ser(tBu)-OH, Fmoc-Gly-OH, Fmoc-sp(tBu)-OH, Fmoc-Ala-OH, Boc-His(Boc)-OH.

[0161] Steps 2-4: These steps were performed in the same manner as steps 2-4 of Example 3.

### EXAMPLE 16

[0162] His-Ala-Asp-Gly-Ser-Phe-Ser-Asp-Glu-Met-Asn-Thr-Ile-Lys(MPA)-Asp-Asn-Leu-Ala-Ala-Arg-Asp-Phe-Ile-Asn-Trp-Leu-Ile-Gln-Thr-Lys-Ile-Thr-Asp -CONH₂

[0163] Step 1: Solid phase peptide synthesis was carried out on a 100 μmole scale. The following protected amino acids were sequentially added to resin following the procedure described in step 1 of Example 1: Fmoc-Asp(tBu)-OH, Fmoc-Thr(tBu)-OH, Fmoc-Ile-OH, Fmoc-Lys(Boc)-OH, Fmoc-Thr(tBu)-OH, Fmoc-Gln(Trt)-OH, Fmoc-Ile-OH, Fmoc-Leu-OH, Fmoc-Trp(Boc)-OH, Fmoc-Asn(Trt)-OH, Fmoc-Ile-OH, Fmoc-Phe-OH, Fmoc-Asp(tBu)-OH, Fmoc-Arg(Pbf)-OH, Fmoc-Ala-OH, Fmoc-Ala-OH, Fmoc-Leu-OH, Fmoc-Asn(Trt)-OH, Fmoc-Asp(tBu)-OH, Fmoc-Lys(Aloc)OH, Fmoc-Ile-OH, Fmoc-Thr(tBu)-OH, Fmoc-Asn(Trt)-OH, Fmoc-Met-OH, Fmoc-Glu(tBu)-OH, Fmoc-Asp(tBu)-OH, Fmoc-Ser(tBu)-OH, Fmoc-Phe-OH, Fmoc-Ser(tBu)-OH, Fmoc-Gly-OH, Fmoc-Asp(tBu)-OH, Fmoc-Ala-OH, Boc-His(Boc)-OH.

[0164] Steps 2-4: These steps were performed in the same manner as steps 2-4 of Example 3.

### EXAMPLE 17

[0165] His-Ala-Asp-Gly-Ser-Phe-Ser-Asp-Glu-Met-Asn-Thr-Ile-Leu-Asp-Asn-Leu-Ala-Ala-Arg-Lys(MPA)-Phe-Ile-Asn-Trp-Leu-Ile-Gln-Thr-Lys-Ile-Thr-Asp -CONH₂

[0166] Step 1: Solid phase peptide synthesis was carried out on a 100 μmole scale. The following protected amino acids were sequentially added to resin following the procedure described in step 1 of Example 1: Fmoc-Asp(tBu)-OH, Fmoc-Thr(tBu)-OH, Fmoc-Ile-OH, Fmoc-Lys(Boc)-OH, Fmoc-Thr(tBu)-OH, Fmoc-Gln(Trt)-OH, Fmoc-Ile-OH, Fmoc-Leu-OH, Fmoc-Trp(Boc)-OH, Fmoc-Asn(Trt)-OH, Fmoc-Ile-OH, Fmoc-Phe-OH, Fmoc-Lys(Aloc)-OH, Fmoc-Arg(Pbf)-OH, Fmoc-Ala-OH, Fmoc-Ala-OH, Fmoc-Leu-OH, Fmoc-Asn(Trt)-OH, Fmoc-Asp(tBu)-OH, Fmoc-Leu-OH, Fmoc-Ile-OH, Fmoc-Thr(tBu)-OH, Fmoc-Asn(Trt)-OH, Fmoc-Met-OH, Fmoc-Glu(tBu)-OH, Fmoc-Asp(tBu)-OH, Fmoc-Ser(tBu)-OH, Fmoc-Phe-OH, Fmoc-Ser(tBu)-OH, Fmoc-Gly-OH, Fmoc-Asp(tBu)-OH, Fmoc-Ala-OH, Boc-His(Boc)-OH.

[0167] Steps 2-4: These steps were performed in the same manner as steps 2-4 of Example 3.

### EXAMPLE 18

[0168] His-Ala-Asp-Gly-Ser-Phe-Ser-Asp-Glu-Met-Asn-Thr-Ile-Leu-Asp-Asn-Lys(AEEA-MPA)-Ala-Ala-Arg-Asp-Phe-Ile-Asn-Trp-Leu-Ile-Gln-Thr-Lys-Ile-Thr -Asp-CONH₂

[0169] Step 1: This step was performed in the same manner as step 1 of Example 15.

[0170] Steps 2-4: These steps were performed in the same manner as steps 2-4 of Example 9.

### EXAMPLE 19

[0171] His-Ala-Asp-Gly-Ser-Phe-Ser-Asp-Glu-Met-Asn-Thr-Ile-Lys(AEEA-MPA)-Asp-Asn-Leu-Ala-Ala-Arg-Asp-Phe-Ile-Asn-Trp-Leu-Ile-Gln-Thr-Lys-Ile-Thr -Asp-CONH₂

[0172] Step 1: This step was performed in the same manner as step 1 of Example 16.

[0173] Steps 2-4: These steps were performed in the same manner as steps 2-4 of Example 9.

### EXAMPLE 20

[0174] His-Ala-Asp-Gly-Ser-Phe-Ser-Asp-Glu-Met-Asn-Thr-Ile-Leu-Asp-Asn-Leu-Ala-Ala-Arg-Lys(AEEA-MPA)-Phe-Ile-Asn-Trp-Leu-Ile-Gln-Thr-Lys-Ile-Thr -Asp-CONH₂

[0175] Step 1: This step was performed in the same manner as step 1 of Example 17.

[0176] Steps 2-4: These steps were performed in the same manner as steps 2-4 of Example 9.

Purification Procedure:

[0177] Each compound was purified by preparative reversed phase HPLC, using a Varian (Dynamax) preparative binary HPLC system. The purification was performed using a Phenomenex Luna 10μ phenyl-hexyl, 50 mm×250 mm column (particules 10μ) equilibrated with a water/TFA mixture (0.1% TFA in H₂O (solvent A) and acetonitrile/TFA (0.1% TFA in CH₃CN (solvent B). Elution was achieved at 50 mL/min by running a 28-38% B gradient over 180 min. Fractions containing peptide were detected by UV absorbance (Varian Dynamax UVD II) at 214 and 254 nm.

[0178] The fractions were collected in 25 mL aliquots. Those containing the desired product were identified by mass detection after direct injection onto LC/MS. The selected fractions were subsequently analyzed by analytical HPLC (20-60% B over 20 min; Phenomenex Luna 5μ phenyl-hexyl, 10 mm×250 nm column, 0.5 mL/min) to identify fractions with >90% purity for pooling. The pool was freeze-dried using liquid nitrogen and subsequently lyophilized for at least 2 days to yield a white powder.

In vivo Results

[0179] The intestinotrophic activity of the compounds of Examples 1-8 has been evaluated in a normal mice model. Five-week-old male CD-1 mice (20-25 g) were treated twice daily for 10 consecutive days with 5 μg/dose of each compound dissolved in 0.9% NaCl aqueous solution. The compounds were administered via subcutaneous injections in the dorsal-lateral area of the lumbar region. Control animals received 0.25 ml/dose of 0.9% NaCl.

[0180] On day 11, mice were fasted for 4 hours and anesthetized with CO₂ Small intestines were removed, cleaned and weighed. Significant increases in the small intestine weight were observed in animals treated with the compounds of Examples 1, 3, 5, 7 and 8. The results are shown in FIG. 1. As it can be seen, more pronounced intestinotrophic effects were obtained with the compounds of Examples 5, 7 and 8, stabilized with a glycine residue in position 2, when compared to the native GLP-2 peptides of Examples 1 and 3.

Dose-Response with Selected Gly2-GLP-2 Analogues

[0181] Six-week-old female CD-1 mice (20-25 g) were treated twice daily for 10 consecutive days with 5, 25 or 50 μg/dose of the compounds of Examples 5, 7 and 8. The compounds were dissolved in 0.083M sodium phosphate buffer, pH 6.8 and administered via subcutaneous injections in the dorsal-lateral area of the lumbar region. Control animals received 0.25 ml/dose of sodium phosphate buffer.

[0182] On day 11, fed mice were anesthetized with Halothane™ and small intestine, large intestine and stomach were collected from each mouse after laparatomy. The tissues were then cleaned and weighed.

[0183] Statistically significant increases (53% to 88%) in the weight of the small intestine were demonstrated in all of the treatment groups as compared to control mice (see FIG. 2). No dose-response, however, was observed with the compounds of Examples 5 and 7, although a possible dose-response was noted for the compound of Example 8.

[0184] The weight of the large intestine was increased by 27 to 48% for all treatment groups. Again, no dose-response was observed for the compounds of Examples 5 and 7, while a possible dose-response was noted for the compound of Example 8 (see FIG. 2).

[0185] These results demonstrate that the GLP-2 derivatives of Examples 7 and 8 display intestinotropic activities similar to the corresponding free peptide of Example 5.

Pharmacokinetic Profiles in Rats

[0186] The pharmacokinetic profiles of the compounds of Examples 5 and 8 were studied in normal rats following a single intravenous or subcutaneous injection. Plasma concentrations were determined by radioimmunoassay with a commercial antibody anti-human GLP-2.

Animal Experimentation

[0187] Test articles were dissolved in 0.083M sodium phosphate buffer, pH 6.8 and administered to eight to eleven-week-old male Sprague-Dawley rats by a single intravenous or subcutaneous injection at a dose level of 500 nmol/kg. Serial blood samples (I50-200 μl) were collected into tubes containing EDTA and DPP-IV inhibitor at the following time-points: pre-dose, 5 and 30 min., and 1, 2, 4, 8, 24, 48, 72 and 96 hours post-test agent administration. Whole blood was centrifuged and subsequent plasma samples were recovered and stored at −80° C. until analysis.

Plasma Analysis

[0188] The plasma concentrations of the compounds of Examples 5 and 8 were determined by radioimmunoassay using a rabbit polyclonal antibody anti-human GLP-2 (Peninsula Laboratories, RGG7167) and iodinated human GLP-2 as tracer.

Pharmacokinetic Analysis

[0189] Descriptive pharmacokinetic parameters were determined by standard model-independent methods (Gibaldi and Perrier, 1982) based on the analysis of plasma concentration-time data. Pharmacokinetic analyses were performed using macros written for Microsoft Excel 97. The following parameters were calculated:
[0190] Cₘₐₓ is the maximum plasma concentration;
[0191] Tₘₐₓ is the time when Cₘₐₓ is observed;
[0192] T_{1/2} is the terminal half-life;
[0193] AUC(0-inf) is the area under the plasma concentration-time curve from time zero to time infinity;
[0194] F is the absolute bioavailability,
[0195] CL is the systemic clearance;
[0196] MRT is mean residence time; and
[0197] Vss is the steady-state volume of distribution.

[0198] The plasma concentration profiles are shown in FIG. 3 and corresponding pharmacokinetic parameters are presented in Table 2 below. These results show that the GLP-2 derivatized according to the present invention effectively reduces the elimination and distribution of corresponding free Gly²GLP-2 peptide, thereby producing greater plasma concentration and longer half-life in the systemic circulation.

TABLE 2
Comparison of the mean pharmacokinetic parameters
of the compounds of Examples 5 and 8 in Sprague-Dawley
rats following a single 500 nmol/kg dose

| Parameter | Compound of Example 5 | | Compound of Example 8 | |
|---|---|---|---|---|
| Dose (nmol/kg) | 500 | 500 | 500 | 500 |
| Route | IV | SC | IV | SC |
| Cₘₐₓ (nM) | 1563.44 | 159.35 | 10108.42 | 650.93 |
| Tₘₐₓ (h)^{a} | N/A | 0.50 | N/A | 0.50 |
| AUC(0-inf) (nM/h) | 626.03 | 205.43 | 89354.35 | 13543.56 |
| CL (mL/min/kg) | 13.89 | N/A | 0.0942 | N/A |
| Vss (L/kg) | 0.2500 | N/A | 0.0953 | N/A |
| MRT (h) | 0.3 | N/A | 16.9 | N/A |
| T_{1/2} (h)^{b} | 1.5 | 0.9 | 16.2 | 23.8 |
| F (%) | N/A | 32.8 | N/A | 15.2 |

^{a}expressed as media
^{b}expressed as harmonic mean

Immunoblotting

[0199] Plasma samples obtained from the rat pharmacokinetic study were analyzed by immunoblotting. Plasma proteins were separated under non-reducing conditions using sodium-dodecyl-sulfate polyacrylamide gel electrophoresis (SDS-PAGE) according to Laemmli (1970). Plasma samples were first diluted 1:10 with distilled water and 20 μl was mixed with 10 μl of 3× Laemmli buffer (30 mM TrisCl, 3 mM EDTA, 15% SDS, pH 6.8) and 2 μl of bromophenol blue solution (0.1% bromophenol blue, 50% glycerol). Mixtures were placed in a boiling water bath for 3 min and loaded on gel. Proteins were first concentrated in a 3% stacking gel and then migrated through 8% separating gel using a mini-gel system with 10-well combs (1.5×4.8 mm). Electrophoresis was run under constant current at 15 mA/gel to concentrate proteins in stacking gel and at 20 mA/gel in separating gel for approximately 1.5 h.

[0200] Proteins were subsequently transferred onto a nitrocellulose membrane using a semi-dry transfer apparatus, for 1 hour at 100 mA/gel. Transfer efficacy was checked by reversible staining of the membrane with 1% red Ponceau™ solution.

Immunochemical Detection

[0201] Membranes were saturated overnight at 4° C. with Tris Buffered Saline (TBS) containing 5% low fat milk. After 3 washes with TBS-0.05% Tween 20™ for 5 min, blots were incubated for 90 min. at room temperature with rabbit polyclonal antibody anti-GLP-2 (Peninsula Lab. RGG7167) diluted 1:2,500 in TBS-0.5% Tween 20™ containing 1% plasma rat. Blots were washed 3 times for 10 min with TBS-0.05% Tween 20™ and subsequently incubated for one hour at room temperature with a peroxidase-labelled donkey anti-rabbit IgG (Jackson, 711-036-152) diluted 1:100,000 in TBS-0.05% Tween 20™. After 3 washes, revelation was performed using a chemioluminescent substrate of peroxidase (ECLTU kit Amersham Pharmacia Biotech). Films were exposed for 5 to 10 min.

[0202] Membrane were alternatively incubated with a peroxidase-labelled rabbit anti-rat albumin (Accurate Chemical, YN-RRaALBP) diluted 1:400,000 in TBS-0.05% Tween 20™ for 1 hour. After 3 washes with TBS-0.05% Tween 20™, revelation was performed as described above.

Results

[0203] A preliminary screening demonstrated that the commercial antibody anti-GLP-2 was not sensitive enough to detect the compound of Example 7 conjugated to proteins by Western-blotting. Consequently, only plasma samples of rats injected with the compound of Example 8 were analyzed by this method.

[0204] The results illustrated in FIG. 4 demonstrate that the compound of Example 8 conjugates efficiently to rat albumin post-iv administration. A weak signal was also observed on albumin post-sc administration (not shown). Comparison with an anti-rat albumin antibody indicates that most of the bands detected by the anti-GLP-2 antibody, except one, are attributable to various albumin species (monomers, dimers and polymers).

[0205] While the invention has been described in connection with specific embodiments thereof, it will be understood that it is capable of further modifications, and this application is intended to cover any variations, uses or adaptations of the invention following, in general, the principles of the invention, and including such departures from the present description as come within known or customary practice within the art to which the invention pertains, and as may be applied to the essential features hereinbefore set forth, and as follows in the scope of the appended claims.

1. A gastrointestinal tissue growth promoter derivative comprising:
a GLP-2 peptide or an analog or fragment thereof having gastrointestinal tissue growth promoting activity; and
a reactive entity coupled to the peptide,
the derivative being capable of covalently binding in vivo with a functionality on a blood component.

2-19. (canceled)

The application's sequence listing, which the Patent Office published only in electronic form, follows.

SEQUENCE LISTING (252 sequences)

SEQ ID NO: 1 - protein, 33 aa, Human
HADGSFSDEMNTILDNLAARDFINWLIQTKITD

SEQ ID NO: 2 - protein, 32 aa, Artificial Sequence
  intestinotrophic analog of GLP-2
  VARIANT (1)...(1): Xaa = His or Tyr, with an amino terminal group or an amino terminal blocking group
  VARIANT (2)...(2): Xaa = is Ala, Gly, D-Ala, Pro, Ile, Nva (norvaline),       alpha- aminobutyric acid, or an Ala-replacement amino acid conferring on said analog resistance to DPP-IV enzyme
  VARIANT (3)...(3): Xaa = Asp, Glu, Pro or Hpro (hydroxyproline); or Xaa-Xaa in positions 2 and 3 taken together are Xaa(psi)(CH(OH)CH2)Xaa; Xaa(psi)(CH2NH2)Xaa or Xaa(psi)(CHCH)Xaa
  VARIANT (4)...(4): Xaa = Gly or Ala
  VARIANT (5)...(5): Xaa = Ser or Ala
  VARIANT (13)...(13): Xaa = Leu or Lys
  VARIANT (15)...(15): Xaa = Asn, Lys or Ala
  VARIANT (16)...(16): Xaa = Leu or Lys
  VARIANT (18)...(18): Xaa = Ala or Thr
  VARIANT (19)...(19): Xaa = Arg, Lys, His or Ala
  VARIANT (20)...(20): Xaa = Asp or Lys
  VARIANT (26)...(26): Xaa = Ile or Leu
  VARIANT (27)...(27): Xaa = Gln or His
  VARIANT (32)...(32): Xaa = Asp or Asn, with a COOH, CONH2 or a C-terminal blocking group
XXXXXFSDYSKYXDXXAXXXFVQWLXXTKITX

SEQ ID NO: 3 - protein, 33 aa, Artificial Sequence; identical to SEQ ID NO: 1
  analog of GLP-2
  AMIDATION (33)...(33)

SEQ ID NO: 4 - protein, 33 aa, Artificial Sequence; identical to SEQ ID NO: 1
  analog of GLP-2
  VARIANT (1)...(1): MPA attached to the His residue
  AMIDATION (33)...(33)

SEQ ID NO: 5 - protein, 34 aa, Artificial Sequence
  analog of GLP-2
  VARIANT (34)...(34): MPA attached to the Lys residue
  AMIDATION (34)...(34)
HADGSFSDEMNTILDNLAARDFINWLIQTKITDK

SEQ ID NO: 6 - protein, 33 aa, Artificial Sequence
  analog of GLP-2
  VARIANT (16)...(16): MPA attached to the Lys residue
  AMIDATION (33)...(33)
HADGSFSDEMNTILDKLAARDFINWLIQTKITD

SEQ ID NO: 7 - protein, 33 aa, Artificial Sequence
  analog of GLP-2
  AMIDATION (33)...(33)
HGDGSFSDEMNTILDNLAARDFINWLIQTKITD

SEQ ID NO: 8 - protein, 33 aa, Artificial Sequence; identical to SEQ ID NO: 7
  analog of GLP-2
  VARIANT (1)...(1): MPA attached to the His residue
  AMIDATION (33)...(33)

SEQ ID NO: 9 - protein, 33 aa, Artificial Sequence
  analog of GLP-2
  VARIANT (16)...(16): MPA attached to the Lys residue
  AMIDATION (33)...(33)
HGDGSFSDEMNTILDKLAARDFINWLIQTKITD

SEQ ID NO: 10 - protein, 34 aa, Artificial Sequence
  analog of GLP-2
  VARIANT (34)...(34): MPA attached to the Lys residue
  AMIDATION (34)...(34)
HGDGSFSDEMNTILDNLAARDFINWLIQTKITDK

SEQ ID NO: 11 - protein, 33 aa, Artificial Sequence; identical to SEQ ID NO: 9
  analog of GLP-2
  VARIANT (16)...(16): AEEA-MPA attached to the Lys residue
  AMIDATION (33)...(33)

SEQ ID NO: 12 - protein, 34 aa, Artificial Sequence; identical to SEQ ID NO: 10
  analog of GLP-2
  VARIANT (34)...(34): AEEA-MPA attached to the Lys residue
  AMIDATION (34)...(34)

SEQ ID NO: 13 - protein, 33 aa, Artificial Sequence; identical to SEQ ID NO: 7
  analog of GLP-2
  VARIANT (1)...(1): MPA-AEEA attached to the His residue
  AMIDATION (33)...(33)

SEQ ID NO: 14 - protein, 33 aa, Artificial Sequence; identical to SEQ ID NO: 1
  analog of GLP-2
  VARIANT (1)...(1): MPA-AEEA attached to the His residue
  AMIDATION (33)...(33)

SEQ ID NO: 15 - protein, 34 aa, Artificial Sequence; identical to SEQ ID NO: 5
  analog of GLP-2
  VARIANT (34)...(34): AEEA-MPA attached to the Lys residue
  AMIDATION (34)...(34)

SEQ ID NO: 16 - protein, 33 aa, Artificial Sequence; identical to SEQ ID NO: 6
  analog of GLP-2
  VARIANT (16)...(16): AEEA-MPA attached to the Lys residue
  AMIDATION (33)...(33)

SEQ ID NO: 17 - protein, 33 aa, Artificial Sequence
  analog of GLP-2
  VARIANT (17)...(17): MPA attached to the Lys residue
  AMIDATION (33)...(33)
HADGSFSDEMNTILDNKAARDFINWLIQTKITD

SEQ ID NO: 18 - protein, 33 aa, Artificial Sequence
  analog of GLP-2
  VARIANT (14)...(14): MPA attached to the Lys residue
  AMIDATION (33)...(33)
HADGSFSDEMNTIKDNLAARDFINWLIQTKITD

SEQ ID NO: 19 - protein, 33 aa, Artificial Sequence
  analog of GLP-2
  VARIANT (21)...(21): MPA attached to the Lys residue
  AMIDATION (33)...(33)
HADGSFSDEMNTILDNLAARKFINWLIQTKITD

SEQ ID NO: 20 - protein, 33 aa, Artificial Sequence; identical to SEQ ID NO: 17
  analog of GLP-2
  VARIANT (17)...(17): AEEA-MPA attached to the Lys residue
  AMIDATION (33)...(33)

SEQ ID NO: 21 - protein, 33 aa, Artificial Sequence; identical to SEQ ID NO: 18
  analog of GLP-2
  VARIANT (14)...(14): AEEA-MPA attached to the Lys residue
  AMIDATION (33)...(33)

SEQ ID NO: 22 - protein, 33 aa, Artificial Sequence; identical to SEQ ID NO: 19
  analog of GLP-2
  VARIANT (21)...(21): AEEA-MPA attached to the Lys residue
  AMIDATION (33)...(33)

SEQ ID NO: 23 - protein, 34 aa, Artificial Sequence; identical to SEQ ID NO: 10
  analog of GLP-2
  AMIDATION (34)...(34)

SEQ ID NO: 24 - protein, 33 aa, Artificial Sequence; identical to SEQ ID NO: 6
  analog of GLP-2
  AMIDATION (33)...(33)

SEQ ID NO: 25 - protein, 33 aa, Artificial Sequence; identical to SEQ ID NO: 9
  analog of GLP-2
  AMIDATION (33)...(33)

SEQ ID NO: 26 - protein, 33 aa, Artificial Sequence; identical to SEQ ID NO: 17
  analog of GLP-2
  AMIDATION (33)...(33)

SEQ ID NO: 27 - protein, 33 aa, Artificial Sequence; identical to SEQ ID NO: 18
  analog of GLP-2
  AMIDATION (33)...(33)

SEQ ID NO: 28 - protein, 33 aa, Artificial Sequence; identical to SEQ ID NO: 19
  analog of GLP-2
  AMIDATION (33)...(33)

SEQ ID NO: 29 - protein, 30 aa, Artificial Sequence
  intestinotrophic analog of GLP-2
  VARIANT (1)...(1): Xaa = His or Tyr, with an amino terminal group or an amino terminal blocking group
  VARIANT (2)...(2): Xaa = is Ala, Gly, D-Ala, Pro, Ile, Nva (Norvaline), alpha -aminobutyric acid, or an Ala-replacement amino acid conferring on said analog resistance to DPP-IV enzyme
  VARIANT (3)...(3): Xaa = Asp, Glu, Pro or Hpro (hydroxyproline); or Xaa-Xaa in positions 2 and 3 taken together are Xaa(psi)(CH(OH)CH2)Xaa; Xaa(psi)(CH2NH2)Xaa or Xaa(psi)(CHCH)Xaa
  VARIANT (4)...(4): Xaa = Gly or Ala
  VARIANT (5)...(5): Xaa = Ser or Ala
  VARIANT (10)...(10): Xaa = Met, Leu, Ile or an oxidatively stable Met-replacement amino acid
  VARIANT (14)...(14): Xaa = Leu or Lys
  VARIANT (16)...(16): Xaa = Asn, Lys or Ala
  VARIANT (17)...(17): Xaa = Leu or Lys
  VARIANT (19)...(19): Xaa = Ala or Thr
  VARIANT (20)...(20): Xaa = Arg, Lys, His or Ala
  VARIANT (21)...(21): Xaa = Asp or Lys
  VARIANT (24)...(24): Xaa = Asn or Ala
  VARIANT (27)...(27): Xaa = Ile or Leu
  VARIANT (28)...(28): Xaa = Gln or His
XXXXXFSDEXNTIXDXXAXXXFIXWLXXTK

SEQ ID NO: 30 - protein, 31 aa, Artificial Sequence
  intestinotrophic analog of GLP-2
  VARIANT (1)...(1): Xaa = His or Tyr, with an amino terminal group or an amino terminal blocking group
  VARIANT (2)...(2): Xaa = is Ala, Gly, D-Ala, Pro, Ile, Nva (Norvaline), alpha -aminobutyric acid, or an Ala-replacement amino acid conferring on said analog resistance to DPP-IV enzyme
  VARIANT (3)...(3): Xaa = Asp, Glu, Pro or Hpro (hydroxyproline); or Xaa-Xaa in positions 2 and 3 taken together are Xaa(psi)(CH(OH)CH2)Xaa; Xaa(psi)(CH2NH2)Xaa or Xaa(psi)(CHCH)Xaa
  VARIANT (4)...(4): Xaa = Gly or Ala
  VARIANT (5)...(5): Xaa = Ser or Ala
  VARIANT (10)...(10): Xaa = Met, Leu, Ile or an oxidatively stable Met-replacement amino acid
  VARIANT (14)...(14): Xaa = Leu or Lys
  VARIANT (16)...(16): Xaa = Asn, Lys or Ala
  VARIANT (17)...(17): Xaa = Leu or Lys
  VARIANT (19)...(19): Xaa = Ala or Thr
  VARIANT (20)...(20): Xaa = Arg, Lys, His or Ala
  VARIANT (21)...(21): Xaa = Asp or Lys
  VARIANT (24)...(24): Xaa = Asn or Ala
  VARIANT (27)...(27): Xaa = Ile or Leu
  VARIANT (28)...(28): Xaa = Gln or His
  VARIANT (31)...(31): Xaa = Arg, Lys or His with a COOH, CONH2 or a C-terminal blocking group
XXXXXFSDEXNTIXDXXAXXXFIXWLXXTKX

SEQ ID NO: 31 - protein, 32 aa, Artificial Sequence
  intestinotrophic analog of GLP-2
  VARIANT (1)...(1): Xaa = His or Tyr, with an amino terminal group or an amino terminal blocking group
  VARIANT (2)...(2): Xaa = is Ala, Gly, D-Ala, Pro, Ile, Nva (Norvaline), alpha -aminobutyric acid, or an Ala-replacement amino acid conferring on said analog resistance to DPP-IV enzyme
  VARIANT (3)...(3): Xaa = Asp, Glu, Pro or Hpro (hydroxyproline); or Xaa-Xaa in positions 2 and 3 taken together are Xaa(psi)(CH(OH)CH2)Xaa; Xaa(psi)(CH2NH2)Xaa or Xaa(psi)(CHCH)Xaa
  VARIANT (4)...(4): Xaa = Gly or Ala
  VARIANT (5)...(5): Xaa = Ser or Ala
  VARIANT (10)...(10): Xaa = Met, Leu, Ile or an oxidatively stable Met-replacement amino acid
  VARIANT (14)...(14): Xaa = Leu or Lys
  VARIANT (16)...(16): Xaa = Asn, Lys or Ala
  VARIANT (17)...(17): Xaa = Leu or Lys
  VARIANT (19)...(19): Xaa = Ala or Thr
  VARIANT (20)...(20): Xaa = Arg, Lys, His or Ala
  VARIANT (21)...(21): Xaa = Asp or Lys
  VARIANT (24)...(24): Xaa = Asn or Ala
  VARIANT (27)...(27): Xaa = Ile or Leu
  VARIANT (28)...(28): Xaa = Gln or His
  VARIANT (31)...(31): Xaa = Arg, Lys or His
  VARIANT (32)...(32): Xaa = Arg, Lys or His with a COOH, CONH2 or a C-terminal blocking group
XXXXXFSDEXNTIXDXXAXXXFIXWLXXTKXX

SEQ ID NO: 32 - protein, 31 aa, Artificial Sequence
  intestinotrophic analog of GLP-2
  VARIANT (1)...(1): Xaa = Arg, Lys or His, with an amino terminal group or an amino terminal blocking group
  VARIANT (2)...(2): Xaa = His or Tyr
  VARIANT (3)...(3): Xaa = is Ala, Gly, D-Ala, Pro, Ile, Nva (Norvaline), alpha -aminobutyric acid, or an Ala-replacement amino acid conferring on said analog resistance to DPP-IV enzyme
  VARIANT (4)...(4): Xaa = Asp, Glu, Pro or Hpro (hydroxyproline); or Xaa-Xaa in positions 3 and 4 taken together are Xaa(psi)(CH(OH)CH2)Xaa; Xaa(psi)(CH2NH2)Xaa or Xaa(psi)(CHCH)Xaa
  VARIANT (5)...(5): Xaa = Gly or Ala
  VARIANT (6)...(6): Xaa = Ser or Ala
  VARIANT (11)...(11): Xaa = Met, Leu, Ile or an oxidatively stable Met-replacement amino acid
  VARIANT (15)...(15): Xaa = Leu or Lys
  VARIANT (17)...(17): Xaa = Asn, Lys or Ala
  VARIANT (18)...(18): Xaa = Leu or Lys
  VARIANT (20)...(20): Xaa = Ala or Thr
  VARIANT (21)...(21): Xaa = Arg, Lys, His or Ala
  VARIANT (22)...(22): Xaa = Asp or Lys
  VARIANT (25)...(25): Xaa = Asn or Ala
  VARIANT (28)...(28): Xaa = Ile or Leu
  VARIANT (29)...(29): Xaa = Gln or His
XXXXXXFSDEXNTIXDXXAXXXFIXWLXXTK

SEQ ID NO: 33 - protein, 32 aa, Artificial Sequence
  intestinotrophic analog of GLP-2
  VARIANT (1)...(1): Xaa = Arg, Lys or His, with an amino terminal group or an amino terminal blocking group
  VARIANT (2)...(2): Xaa = His or Tyr
  VARIANT (3)...(3): Xaa = is Ala, Gly, D-Ala, Pro, Ile, Nva (Norvaline), alpha -aminobutyric acid, or an Ala-replacement amino acid conferring on said analog resistance to DPP-IV enzyme
  VARIANT (4)...(4): Xaa = Asp, Glu, Pro or Hpro (hydroxyproline); or Xaa-Xaa in positions 3 and 4 taken together are Xaa(psi)(CH(OH)CH2)Xaa; Xaa(psi)(CH2NH2)Xaa or Xaa(psi)(CHCH)Xaa
  VARIANT (5)...(5): Xaa = Gly or Ala
  VARIANT (6)...(6): Xaa = Ser or Ala
  VARIANT (11)...(11): Xaa = Met, Leu, Ile or an oxidatively stable Met-replacement amino acid
  VARIANT (15)...(15): Xaa = Leu or Lys
  VARIANT (17)...(17): Xaa = Asn, Lys or Ala
  VARIANT (18)...(18): Xaa = Leu or Lys
  VARIANT (20)...(20): Xaa = Ala or Thr
  VARIANT (21)...(21): Xaa = Arg, Lys, His or Ala
  VARIANT (22)...(22): Xaa = Asp or Lys
  VARIANT (25)...(25): Xaa = Asn or Ala
  VARIANT (28)...(28): Xaa = Ile or Leu
  VARIANT (29)...(29): Xaa = Gln or His
  VARIANT (32)...(32): Xaa = Arg, Lys or His with a COOH, CONH2 or a C-terminal blocking group
XXXXXXFSDEXNTIXDXXAXXXFIXWLXXTKX

SEQ ID NO: 34 - protein, 33 aa, Artificial Sequence
  intestinotrophic analog of GLP-2
  VARIANT (1)...(1): Xaa = Arg, Lys or His, with an amino terminal group or an amino terminal blocking group
  VARIANT (2)...(2): Xaa = His or Tyr
  VARIANT (3)...(3): Xaa = is Ala, Gly, D-Ala, Pro, Ile, Nva (Norvaline), alpha- aminobutyric acid, or an Ala-replacement amino acid conferring on said analog resistance to DPP-IV enzyme
  VARIANT (4)...(4): Xaa = Asp, Glu, Pro or Hpro (hydroxyproline); or Xaa-Xaa in positions 3 and 4 taken together are Xaa(psi)(CH(OH)CH2)Xaa; Xaa(psi)(CH2NH2)Xaa or Xaa(psi)(CHCH)Xaa
  VARIANT (5)...(5): Xaa = Gly or Ala
  VARIANT (6)...(6): Xaa = Ser or Ala
  VARIANT (11)...(11): Xaa = Met, Leu, Ile or an oxidatively stable Met-replacement amino acid
  VARIANT (15)...(15): Xaa = Leu or Lys
  VARIANT (17)...(17): Xaa = Asn, Lys or Ala
  VARIANT (18)...(18): Xaa = Leu or Lys
  VARIANT (20)...(20): Xaa = Ala or Thr
  VARIANT (21)...(21): Xaa = Arg, Lys, His or Ala
  VARIANT (22)...(22): Xaa = Asp or Lys
  VARIANT (25)...(25): Xaa = Asn or Ala
  VARIANT (28)...(28): Xaa = Ile or Leu
  VARIANT (29)...(29): Xaa = Gln or His
  VARIANT (32)...(32): Xaa = Arg, Lys or His
  VARIANT (33)...(33): Xaa = Arg, Lys or His with a COOH, CONH2 or a C-terminal blocking group
XXXXXXFSDEXNTIXDXXAXXXFIXWLXXTKXX

SEQ ID NO: 35 - protein, 32 aa, Artificial Sequence
  intestinotrophic analog of GLP-2
  VARIANT (1)...(1): Xaa = Arg, Lys or His, with an amino terminal group or an amino terminal blocking group
  VARIANT (2)...(2): Xaa = Arg, Lys or His
  VARIANT (3)...(3): Xaa = His or Tyr
  VARIANT (4)...(4): Xaa = is Ala, Gly, D-Ala, Pro, Ile, Nva (Norvaline), alpha -aminobutyric acid, or an Ala-replacement amino acid conferring on said analog resistance to DPP-IV enzyme
  VARIANT (5)...(5): Xaa = Asp, Glu, Pro or Hpro (hydroxyproline); or Xaa-Xaa in positions 4 and 5 taken together are Xaa(psi)(CH(OH)CH2)Xaa; Xaa(psi)(CH2NH2)Xaa or Xaa(psi)(CHCH)Xaa
  VARIANT (6)...(6): Xaa = Gly or Ala
  VARIANT (7)...(7): Xaa = Ser or Ala
  VARIANT (12)...(12): Xaa = Met, Leu, Ile or an oxidatively stable Met-replacement amino acid
  VARIANT (16)...(16): Xaa = Leu or Lys
  VARIANT (18)...(18): Xaa = Asn, Lys or Ala
  VARIANT (19)...(19): Xaa = Leu or Lys
  VARIANT (21)...(21): Xaa = Ala or Thr
  VARIANT (22)...(22): Xaa = Arg, Lys, His or Ala
  VARIANT (23)...(23): Xaa = Asp or Lys
  VARIANT (26)...(26): Xaa = Asn or Ala
  VARIANT (29)...(29): Xaa = Ile or Leu
  VARIANT (30)...(30): Xaa = Gln or His
XXXXXXXFSDEXNTIXDXXAXXXFIXWLXXTK

SEQ ID NO: 36 - protein, 33 aa, Artificial Sequence
  intestinotrophic analog of GLP-2
  VARIANT (1)...(1): Xaa = Arg, Lys or His, with an amino terminal group or an amino terminal blocking group
  VARIANT (2)...(2): Xaa = Arg, Lys or His
  VARIANT (3)...(3): Xaa = His or Tyr
  VARIANT (4)...(4): Xaa = is Ala, Gly, D-Ala, Pro, Ile, Nva (Norvaline), alpha -aminobutyric acid, or an Ala-replacement amino acid conferring on said analog resistance to DPP-IV enzyme
  VARIANT (5)...(5): Xaa = Asp, Glu, Pro or Hpro (hydroxyproline); or Xaa-Xaa in positions 4 and 5 taken together are Xaa(psi)(CH(OH)CH2)Xaa; Xaa(psi)(CH2NH2)Xaa or Xaa(psi)(CHCH)Xaa
  VARIANT (6)...(6): Xaa = Gly or Ala
  VARIANT (7)...(7): Xaa = Ser or Ala
  VARIANT (12)...(12): Xaa = Met, Leu, Ile or an oxidatively stable Met-replacement amino acid
  VARIANT (16)...(16): Xaa = Leu or Lys
  VARIANT (18)...(18): Xaa = Asn, Lys or Ala
  VARIANT (19)...(19): Xaa = Leu or Lys
  VARIANT (21)...(21): Xaa = Ala or Thr
  VARIANT (22)...(22): Xaa = Arg, Lys, His or Ala
  VARIANT (23)...(23): Xaa = Asp or Lys
  VARIANT (26)...(26): Xaa = Asn or Ala
  VARIANT (29)...(29): Xaa = Ile or Leu
  VARIANT (30)...(30): Xaa = Gln or His
  VARIANT (33)...(33): Xaa = Arg, Lys or His with a COOH, CONH2 or a C-terminal blocking group
XXXXXXXFSDEXNTIXDXXAXXXFIXWLXXTKX

SEQ ID NO: 37 - protein, 34 aa, Artificial Sequence
  intestinotrophic analog of GLP-2
  VARIANT (1)...(1): Xaa = Arg, Lys or His, with an amino terminal group or an amino terminal blocking group
  VARIANT (2)...(2): Xaa = Arg, Lys or His
  VARIANT (3)...(3): Xaa = His or Tyr
  VARIANT (4)...(4): Xaa = is Ala, Gly, D-Ala, Pro, Ile, Nva (Norvaline), alpha -aminobutyric acid, or an Ala-replacement amino acid conferring on said analog resistance to DPP-IV enzyme
  VARIANT (5)...(5): Xaa = Asp, Glu, Pro or Hpro (hydroxyproline); or Xaa-Xaa in positions 3 and 4 taken together are Xaa(psi)(CH(OH)CH2)Xaa; Xaa(psi)(CH2NH2)Xaa or Xaa(psi)(CHCH)Xaa
  VARIANT (6)...(6): Xaa = Gly or Ala
  VARIANT (7)...(7): Xaa = Ser or Ala
  VARIANT (12)...(12): Xaa = Met, Leu, Ile or an oxidatively stable Met-replacement amino acid
  VARIANT (16)...(16): Xaa = Leu or Lys
  VARIANT (18)...(18): Xaa = Asn, Lys or Ala
  VARIANT (19)...(19): Xaa = Leu or Lys
  VARIANT (21)...(21): Xaa = Ala or Thr
  VARIANT (22)...(22): Xaa = Arg, Lys, His or Ala
  VARIANT (23)...(23): Xaa = Asp or Lys
  VARIANT (26)...(26): Xaa = Asn or Ala
  VARIANT (29)...(29): Xaa = Ile or Leu
  VARIANT (30)...(30): Xaa = Gln or His
  VARIANT (33)...(33): Xaa = Arg, Lys or His
  VARIANT (34)...(34): Xaa = Arg, Lys or His with a COOH, CONH2 or a C-terminal blocking group
XXXXXXXFSDEXNTIXDXXAXXXFIXWLXXTKXX

SEQ ID NO: 38 - protein, 30 aa, Artificial Sequence
  intestinotrophic analog of GLP-2
  VARIANT (1)...(1): Xaa = His or Tyr, with an amino terminal group or an amino terminal blocking group
  VARIANT (2)...(2): Xaa = is Ala, Gly, D-Ala, Pro, Ile, Nva (Norvaline), alpha -aminobutyric acid, or an Ala-replacement amino acid conferring on said analog resistance to DPP-IV enzyme
  VARIANT (3)...(3): Xaa = Asp, Glu, Pro or Hpro (hydroxyproline); or Xaa-Xaa in positions 2 and 3 taken together are Xaa(psi)(CH(OH)CH2)Xaa; Xaa(psi)(CH2NH2)Xaa or Xaa(psi)(CHCH)Xaa
  VARIANT (4)...(4): Xaa = Gly or Ala
  VARIANT (5)...(5): Xaa = Ser or Ala
  VARIANT (10)...(10): Xaa = Met, Leu, Ile or an oxidatively stable Met-replacement amino acid
  VARIANT (14)...(14): Xaa = Leu or Lys
  VARIANT (16)...(16): Xaa = Asn, Lys or Ala
  VARIANT (17)...(17): Xaa = Leu or Lys
  VARIANT (19)...(19): Xaa = Ala or Thr
  VARIANT (20)...(20): Xaa = Arg, Lys, His or Ala
  VARIANT (21)...(21): Xaa = Asp or Lys
  VARIANT (27)...(27): Xaa = Ile or Leu
  VARIANT (28)...(28): Xaa = Gln or His
XXXXXFSDEXNTIXDXXAXXXFVQWLXXTK

SEQ ID NO: 39 - protein, 31 aa, Artificial Sequence
  intestinotrophic analog of GLP-2
  VARIANT (1)...(1): Xaa = His or Tyr, with an amino terminal group or an amino terminal blocking group
  VARIANT (2)...(2): Xaa = is Ala, Gly, D-Ala, Pro, Ile, Nva (Norvaline), alpha -aminobutyric acid, or an Ala-replacement amino acid conferring on said analog resistance to DPP-IV enzyme
  VARIANT (3)...(3): Xaa = Asp, Glu, Pro or Hpro (hydroxyproline); or Xaa-Xaa in positions 2 and 3 taken together are Xaa(psi)(CH(OH)CH2)Xaa; Xaa(psi)(CH2NH2)Xaa or Xaa(psi)(CHCH)Xaa
  VARIANT (4)...(4): Xaa = Gly or Ala
  VARIANT (5)...(5): Xaa = Ser or Ala
  VARIANT (10)...(10): Xaa = Met, Leu, Ile or an oxidatively stable Met-replacement amino acid
  VARIANT (14)...(14): Xaa = Leu or Lys
  VARIANT (16)...(16): Xaa = Asn, Lys or Ala
  VARIANT (17)...(17): Xaa = Leu or Lys
  VARIANT (19)...(19): Xaa = Ala or Thr
  VARIANT (20)...(20): Xaa = Arg, Lys, His or Ala
  VARIANT (21)...(21): Xaa = Asp or Lys
  VARIANT (27)...(27): Xaa = Ile or Leu
  VARIANT (28)...(28): Xaa = Gln or His
  VARIANT (31)...(31): Xaa = Arg, Lys or His with a COOH, CONH2 or a C-terminal blocking group
XXXXXFSDEXNTIXDXXAXXXFVQWLXXTKX

SEQ ID NO: 40 - protein, 32 aa, Artificial Sequence
  intestinotrophic analog of GLP-2
  VARIANT (1)...(1): Xaa = His or Tyr, with an amino terminal group or an amino terminal blocking group
  VARIANT (2)...(2): Xaa = is Ala, Gly, D-Ala, Pro, Ile, Nva (Norvaline), alpha -aminobutyric acid, or an Ala-replacement amino acid conferring on said analog resistance to DPP-IV enzyme
  VARIANT (3)...(3): Xaa = Asp, Glu, Pro or Hpro (hydroxyproline); or Xaa-Xaa in positions 3 and 4 taken together are Xaa(psi)(CH(OH)CH2)Xaa; Xaa(psi)(CH2NH2)Xaa or Xaa(psi)(CHCH)Xaa
  VARIANT (4)...(4): Xaa = Gly or Ala
  VARIANT (5)...(5): Xaa = Ser or Ala
  VARIANT (10)...(10): Xaa = Met, Leu, Ile or an oxidatively stable Met-replacement amino acid
  VARIANT (14)...(14): Xaa = Leu or Lys
  VARIANT (16)...(16): Xaa = Asn, Lys or Ala
  VARIANT (17)...(17): Xaa = Leu or Lys
  VARIANT (19)...(19): Xaa = Ala or Thr
  VARIANT (20)...(20): Xaa = Arg, Lys, His or Ala
  VARIANT (21)...(21): Xaa = Asp or Lys
  VARIANT (27)...(27): Xaa = Ile or Leu
  VARIANT (28)...(28): Xaa = Gln or His
  VARIANT (31)...(31): Xaa = Arg, Lys or His
  VARIANT (32)...(32): Xaa = Arg, Lys or His with a COOH, CONH2 or a C-terminal blocking group
XXXXXFSDEXNTIXDXXAXXXFVQWLXXTKXX

SEQ ID NO: 41 - protein, 31 aa, Artificial Sequence
  intestinotrophic analog of GLP-2
  VARIANT (1)...(1): Xaa = Arg, Lys or His, with an amino terminal group or an amino terminal blocking group
  VARIANT (2)...(2): Xaa = His or Tyr
  VARIANT (3)...(3): Xaa = is Ala, Gly, D-Ala, Pro, Ile, Nva (Norvaline), alpha -aminobutyric acid, or an Ala-replacement amino acid conferring on said analog resistance to DPP-IV enzyme
  VARIANT (4)...(4): Xaa = Asp, Glu, Pro or Hpro (hydroxyproline); or Xaa-Xaa in positions 3 and 4 taken together are Xaa(psi)(CH(OH)CH2)Xaa; Xaa(psi)(CH2NH2)Xaa or Xaa(psi)(CHCH)Xaa
  VARIANT (5)...(5): Xaa = Gly or Ala
  VARIANT (6)...(6): Xaa = Ser or Ala
  VARIANT (11)...(11): Xaa = Met, Leu, Ile or an oxidatively stable Met-replacement amino acid
  VARIANT (15)...(15): Xaa = Leu or Lys
  VARIANT (17)...(17): Xaa = Asn, Lys or Ala
  VARIANT (18)...(18): Xaa = Leu or Lys
  VARIANT (20)...(20): Xaa = Ala or Thr
  VARIANT (21)...(21): Xaa = Arg, Lys, His or Ala
  VARIANT (22)...(22): Xaa = Asp or Lys
  VARIANT (28)...(28): Xaa = Ile or Leu
  VARIANT (29)...(29): Xaa = Gln or His
XXXXXXFSDEXNTIXDXXAXXXFVQWLXXTK

SEQ ID NO: 42 - protein, 32 aa, Artificial Sequence
  intestinotrophic analog of GLP-2
  VARIANT (1)...(1): Xaa = Arg, Lys or His, with an amino terminal group or an amino terminal blocking group
  VARIANT (2)...(2): Xaa = His or Tyr
  VARIANT (3)...(3): Xaa = is Ala, Gly, D-Ala, Pro, Ile, Nva (Norvaline), alpha -aminobutyric acid, or an Ala-replacement amino acid conferring on said analog resistance to DPP-IV enzyme
  VARIANT (4)...(4): Xaa = Asp, Glu, Pro or Hpro (hydroxyproline); or Xaa-Xaa in positions 3 and 4 taken together are Xaa(psi)(CH(OH)CH2)Xaa; Xaa(psi)(CH2NH2)Xaa or Xaa(psi)(CHCH)Xaa
  VARIANT (5)...(5): Xaa = Gly or Ala
  VARIANT (6)...(6): Xaa = Ser or Ala
  VARIANT (11)...(11): Xaa = Met, Leu, Ile or an oxidatively stable Met-replacement amino acid
  VARIANT (15)...(15): Xaa = Leu or Lys
  VARIANT (17)...(17): Xaa = Asn, Lys or Ala
  VARIANT (18)...(18): Xaa = Leu or Lys
  VARIANT (20)...(20): Xaa = Ala or Thr
  VARIANT (21)...(21): Xaa = Arg, Lys, His or Ala
  VARIANT (22)...(22): Xaa = Asp or Lys
  VARIANT (28)...(28): Xaa = Ile or Leu
  VARIANT (29)...(29): Xaa = Gln or His
  VARIANT (32)...(32): Xaa = Arg, Lys or His with a COOH, CONH2 or a C-terminal blocking group
XXXXXXFSDEXNTIXDXXAXXXFVQWLXXTKX

SEQ ID NO: 43 - protein, 33 aa, Artificial Sequence
  intestinotrophic analog of GLP-2
  VARIANT (1)...(1): Xaa = Arg, Lys or His, with an amino terminal group or an amino terminal blocking group
  VARIANT (2)...(2): Xaa = His or Tyr
  VARIANT (3)...(3): Xaa = is Ala, Gly, D-Ala, Pro, Ile, Nva (Norvaline), alpha -aminobutyric acid, or an Ala-replacement amino acid conferring on said analog resistance to DPP-IV enzyme
  VARIANT (4)...(4): Xaa = Asp, Glu, Pro or Hpro (hydroxyproline); or Xaa-Xaa in positions 3 and 4 taken together are Xaa(psi)(CH(OH)CH2)Xaa; Xaa(psi)(CH2NH2)Xaa or Xaa(psi)(CHCH)Xaa
  VARIANT (5)...(5): Xaa = Gly or Ala
  VARIANT (6)...(6): Xaa = Ser or Ala
  VARIANT (11)...(11): Xaa = Met, Leu, Ile or an oxidatively stable Met-replacement amino acid
  VARIANT (15)...(15): Xaa = Leu or Lys
  VARIANT (17)...(17): Xaa = Asn, Lys or Ala
  VARIANT (18)...(18): Xaa = Leu or Lys
  VARIANT (20)...(20): Xaa = Ala or Thr
  VARIANT (21)...(21): Xaa = Arg, Lys, His or Ala
  VARIANT (22)...(22): Xaa = Asp or Lys
  VARIANT (28)...(28): Xaa = Ile or Leu
  VARIANT (29)...(29): Xaa = Gln or His
  VARIANT (32)...(32): Xaa = Arg, Lys or His
  VARIANT (33)...(33): Xaa = Arg, Lys or His with a COOH, CONH2 or a C-terminal blocking group
XXXXXXFSDEXNTIXDXXAXXXFVQWLXXTKXX

SEQ ID NO: 44 - protein, 32 aa, Artificial Sequence
  intestinotrophic analog of GLP-2
  VARIANT (1)...(1): Xaa = Arg, Lys or His, with an amino terminal group or an amino terminal blocking group
  VARIANT (2)...(2): Xaa = Arg, Lys or His
  VARIANT (3)...(3): Xaa = His or Tyr
  VARIANT (4)...(4): Xaa = is Ala, Gly, D-Ala, Pro, Ile, Nva (Norvaline), alpha -aminobutyric acid, or an Ala-replacement amino acid conferring on said analog resistance to DPP-IV enzyme
  VARIANT (5)...(5): Xaa = Asp, Glu, Pro or Hpro (hydroxyproline); or Xaa-Xaa in positions 4 and 5 taken together are Xaa(psi)(CH(OH)CH2)Xaa; Xaa(psi)(CH2NH2)Xaa or Xaa(psi)(CHCH)Xaa
  VARIANT (6)...(6): Xaa = Gly or Ala
  VARIANT (7)...(7): Xaa = Ser or Ala
  VARIANT (12)...(12): Xaa = Met, Leu, Ile or an oxidatively stable Met-replacement amino acid
  VARIANT (16)...(16): Xaa = Leu or Lys
  VARIANT (18)...(18): Xaa = Asn, Lys or Ala
  VARIANT (19)...(19): Xaa = Leu or Lys
  VARIANT (21)...(21): Xaa = Ala or Thr
  VARIANT (22)...(22): Xaa = Arg, Lys, His or Ala
  VARIANT (23)...(23): Xaa = Asp or Lys
  VARIANT (29)...(29): Xaa = Ile or Leu
  VARIANT (30)...(30): Xaa = Gln or His
XXXXXXXFSDEXNTIXDXXAXXXFVQWLXXTK

SEQ ID NO: 45 - protein, 33 aa, Artificial Sequence
  intestinotrophic analog of GLP-2
  VARIANT (1)...(1): Xaa = Arg, Lys or His, with an amino terminal group or an amino terminal blocking group
  VARIANT (2)...(2): Xaa = Arg, Lys or His
  VARIANT (3)...(3): Xaa = His or Tyr
  VARIANT (4)...(4): Xaa = is Ala, Gly, D-Ala, Pro, Ile, Nva (Norvaline), alpha -aminobutyric acid, or an Ala-replacement amino acid conferring on said analog resistance to DPP-IV enzyme
  VARIANT (5)...(5): Xaa = Asp, Glu, Pro or Hpro (hydroxyproline); or Xaa-Xaa in positions 4 and 5 taken together are Xaa(psi)(CH(OH)CH2)Xaa; Xaa(psi)(CH2NH2)Xaa or Xaa(psi)(CHCH)Xaa
  VARIANT (6)...(6): Xaa = Gly or Ala
  VARIANT (7)...(7): Xaa = Ser or Ala
  VARIANT (12)...(12): Xaa = Met, Leu, Ile or an oxidatively stable Met-replacement amino acid
  VARIANT (16)...(16): Xaa = Leu or Lys
  VARIANT (18)...(18): Xaa = Asn, Lys or Ala
  VARIANT (19)...(19): Xaa = Leu or Lys
  VARIANT (21)...(21): Xaa = Ala or Thr
  VARIANT (22)...(22): Xaa = Arg, Lys, His or Ala
  VARIANT (23)...(23): Xaa = Asp or Lys
  VARIANT (29)...(29): Xaa = Ile or Leu
  VARIANT (30)...(30): Xaa = Gln or His
  VARIANT (33)...(33): Xaa = Arg, Lys or His with a COOH, CONH2 or a C-terminal blocking group
XXXXXXXFSDEXNTIXDXXAXXXFVQWLXXTKX

SEQ ID NO: 46 - protein, 34 aa, Artificial Sequence
  intestinotrophic analog of GLP-2
  VARIANT (1)...(1): Xaa = Arg, Lys or His, with an amino terminal group or an amino terminal blocking group
  VARIANT (2)...(2): Xaa = Arg, Lys or His
  VARIANT (3)...(3): Xaa = His or Tyr
  VARIANT (4)...(4): Xaa = is Ala, Gly, D-Ala, Pro, Ile, Nva (Norvaline), alpha -aminobutyric acid, or an Ala-replacement amino acid conferring on said analog resistance to DPP-IV enzyme
  VARIANT (5)...(5): Xaa = Asp, Glu, Pro or Hpro (hydroxyproline); or Xaa-Xaa in positions 4 and 5 taken together are Xaa(psi)(CH(OH)CH2)Xaa; Xaa(psi)(CH2NH2)Xaa or Xaa(psi)(CHCH)Xaa
  VARIANT (6)...(6): Xaa = Gly or Ala
  VARIANT (7)...(7): Xaa = Ser or Ala
  VARIANT (12)...(12): Xaa = Met, Leu, Ile or an oxidatively stable Met-replacement amino acid
  VARIANT (16)...(16): Xaa = Leu or Lys
  VARIANT (18)...(18): Xaa = Asn, Lys or Ala
  VARIANT (19)...(19): Xaa = Leu or Lys
  VARIANT (21)...(21): Xaa = Ala or Thr
  VARIANT (22)...(22): Xaa = Arg, Lys, His or Ala
  VARIANT (23)...(23): Xaa = Asp or Lys
  VARIANT (29)...(29): Xaa = Ile or Leu
  VARIANT (30)...(30): Xaa = Gln or His
  VARIANT (33)...(33): Xaa = Arg, Lys or His
  VARIANT (34)...(34): Xaa = Arg, Lys or His with a COOH, CONH2 or a C-terminal blocking group
XXXXXXXFSDEXNTIXDXXAXXXFVQWLXXTKXX

SEQ ID NO: 47 - protein, 30 aa, Artificial Sequence
  intestinotrophic analog of GLP-2
  VARIANT (1)...(1): Xaa = His or Tyr, with an amino terminal group or an amino terminal blocking group
  VARIANT (2)...(2): Xaa = is Ala, Gly, D-Ala, Pro, Ile, Nva (Norvaline), alpha -aminobutyric acid, or an Ala-replacement amino acid conferring on said analog resistance to DPP-IV enzyme
  VARIANT (3)...(3): Xaa = Asp, Glu, Pro or Hpro (hydroxyproline); or Xaa-Xaa in positions 2 and 3 taken together are Xaa(psi)(CH(OH)CH2)Xaa; Xaa(psi)(CH2NH2)Xaa or Xaa(psi)(CHCH)Xaa
  VARIANT (4)...(4): Xaa = Gly or Ala
  VARIANT (5)...(5): Xaa = Ser or Ala
  VARIANT (10)...(10): Xaa = Met, Leu, Ile or an oxidatively stable Met-replacement amino acid
  VARIANT (14)...(14): Xaa = Leu or Lys
  VARIANT (16)...(16): Xaa = Asn, Lys or Ala
  VARIANT (17)...(17): Xaa = Leu or Lys
  VARIANT (19)...(19): Xaa = Ala or Thr
  VARIANT (20)...(20): Xaa = Arg, Lys, His or Ala
  VARIANT (21)...(21): Xaa = Asp or Lys
  VARIANT (24)...(24): Xaa = Asn or Ala
  VARIANT (27)...(27): Xaa = Ile or Leu
  VARIANT (28)...(28): Xaa = Gln or His
XXXXXFSDGXNTVXDXXAXXXFIXWLXXTK

SEQ ID NO: 48 - protein, 31 aa, Artificial Sequence
  intestinotrophic analog of GLP-2
  VARIANT (1)...(1): Xaa = His or Tyr, with an amino terminal group or an amino terminal blocking group
  VARIANT (2)...(2): Xaa = is Ala, Gly, D-Ala, Pro, Ile, Nva (Norvaline), alpha -aminobutyric acid, or an Ala-replacement amino acid conferring on said analog resistance to DPP-IV enzyme
  VARIANT (3)...(3): Xaa = Asp, Glu, Pro or Hpro (hydroxyproline); or Xaa-Xaa in positions 2 and 3 taken together are Xaa(psi)(CH(OH)CH2)Xaa; Xaa(psi)(CH2NH2)Xaa or Xaa(psi)(CHCH)Xaa
  VARIANT (4)...(4): Xaa = Gly or Ala
  VARIANT (5)...(5): Xaa = Ser or Ala
  VARIANT (10)...(10): Xaa = Met, Leu, Ile or an oxidatively stable Met-replacement amino acid
  VARIANT (14)...(14): Xaa = Leu or Lys
  VARIANT (16)...(16): Xaa = Asn, Lys or Ala
  VARIANT (17)...(17): Xaa = Leu or Lys
  VARIANT (19)...(19): Xaa = Ala or Thr
  VARIANT (20)...(20): Xaa = Arg, Lys, His or Ala
  VARIANT (21)...(21): Xaa = Asp or Lys
  VARIANT (24)...(24): Xaa = Asn or Ala
  VARIANT (27)...(27): Xaa = Ile or Leu
  VARIANT (28)...(28): Xaa = Gln or His
  VARIANT (31)...(31): Xaa = Arg, Lys or His with a COOH, CONH2 or a C-terminal blocking group
XXXXXFSDGXNTVXDXXAXXXFIXWLXXTKX

SEQ ID NO: 49 - protein, 32 aa, Artificial Sequence
  intestinotrophic analog of GLP-2
  VARIANT (1)...(1): Xaa = His or Tyr, with an amino terminal group or an amino terminal blocking group
  VARIANT (2)...(2): Xaa = is Ala, Gly, D-Ala, Pro, Ile, Nva (Norvaline), alpha -aminobutyric acid, or an Ala-replacement amino acid conferring on said analog resistance to DPP-IV enzyme
  VARIANT (3)...(3): Xaa = Asp, Glu, Pro or Hpro (hydroxyproline); or Xaa-Xaa in positions 2 and 3 taken together are Xaa(psi)(CH(OH)CH2)Xaa; Xaa(psi)(CH2NH2)Xaa or Xaa(psi)(CHCH)Xaa
  VARIANT (4)...(4): Xaa = Gly or Ala
  VARIANT (5)...(5): Xaa = Ser or Ala
  VARIANT (10)...(10): Xaa = Met, Leu, Ile or an oxidatively stable Met-replacement amino acid
  VARIANT (14)...(14): Xaa = Leu or Lys
  VARIANT (16)...(16): Xaa = Asn, Lys or Ala
  VARIANT (17)...(17): Xaa = Leu or Lys
  VARIANT (19)...(19): Xaa = Ala or Thr
  VARIANT (20)...(20): Xaa = Arg, Lys, His or Ala
  VARIANT (21)...(21): Xaa = Asp or Lys
  VARIANT (24)...(24): Xaa = Asn or Ala
  VARIANT (27)...(27): Xaa = Ile or Leu
  VARIANT (28)...(28): Xaa = Gln or His
  VARIANT (31)...(31): Xaa = Arg, Lys or His
  VARIANT (32)...(32): Xaa = Arg, Lys or His with a COOH, CONH2 or a C-terminal blocking group
XXXXXFSDGXNTVXDXXAXXXFIXWLXXTKXX

SEQ ID NO: 50 - protein, 31 aa, Artificial Sequence
  intestinotrophic analog of GLP-2
  VARIANT (1)...(1): Xaa = Arg, Lys or His, with an amino terminal group or an amino terminal blocking group
  VARIANT (2)...(2): Xaa = His or Tyr
  VARIANT (3)...(3): Xaa = is Ala, Gly, D-Ala, Pro, Ile, Nva (Norvaline), alpha -aminobutyric acid, or an Ala-replacement amino acid conferring on said analog resistance to DPP-IV enzyme
  VARIANT (4)...(4): Xaa = Asp, Glu, Pro or Hpro (hydroxyproline); or Xaa-Xaa in positions 3 and 4 taken together are Xaa(psi)(CH(OH)CH2)Xaa; Xaa(psi)(CH2NH2)Xaa or Xaa(psi)(CHCH)Xaa
  VARIANT (5)...(5): Xaa = Gly or Ala
  VARIANT (6)...(6): Xaa = Ser or Ala
  VARIANT (11)...(11): Xaa = Met, Leu, Ile or an oxidatively stable Met-replacement amino acid
  VARIANT (15)...(15): Xaa = Leu or Lys
  VARIANT (17)...(17): Xaa = Asn, Lys or Ala
  VARIANT (18)...(18): Xaa = Leu or Lys
  VARIANT (20)...(20): Xaa = Ala or Thr
  VARIANT (21)...(21): Xaa = Arg, Lys, His or Ala
  VARIANT (22)...(22): Xaa = Asp or Lys
  VARIANT (25)...(25): Xaa = Asn or Ala
  VARIANT (28)...(28): Xaa = Ile or Leu
  VARIANT (29)...(29): Xaa = Gln or His
XXXXXXFSDGXNTVXDXXAXXXFIXWLXXTK

SEQ ID NO: 51 - protein, 32 aa, Artificial Sequence
  intestinotrophic analog of GLP-2
  VARIANT (1)...(1): Xaa = Arg, Lys or His, with an amino terminal group or an amino terminal blocking group
  VARIANT (2)...(2): Xaa = His or Tyr
  VARIANT (3)...(3): Xaa = is Ala, Gly, D-Ala, Pro, Ile, Nva (Norvaline), alpha -aminobutyric acid, or an Ala-replacement amino acid conferring on said analog resistance to DPP-IV enzyme
  VARIANT (4)...(4): Xaa = Asp, Glu, Pro or Hpro (hydroxyproline); or Xaa-Xaa in positions 3 and 4 taken together are Xaa(psi)(CH(OH)CH2)Xaa; Xaa(psi)(CH2NH2)Xaa or Xaa(psi)(CHCH)Xaa
  VARIANT (5)...(5): Xaa = Gly or Ala
  VARIANT (6)...(6): Xaa = Ser or Ala
  VARIANT (11)...(11): Xaa = Met, Leu, Ile or an oxidatively stable Met-replacement amino acid
  VARIANT (15)...(15): Xaa = Leu or Lys
  VARIANT (17)...(17): Xaa = Asn, Lys or Ala
  VARIANT (18)...(18): Xaa = Leu or Lys
  VARIANT (20)...(20): Xaa = Ala or Thr
  VARIANT (21)...(21): Xaa = Arg, Lys, His or Ala
  VARIANT (22)...(22): Xaa = Asp or Lys
  VARIANT (25)...(25): Xaa = Asn or Ala
  VARIANT (28)...(28): Xaa = Ile or Leu
  VARIANT (29)...(29): Xaa = Gln or His
  VARIANT (32)...(32): Xaa = Arg, Lys or His with a COOH, CONH2 or a C-terminal blocking group
XXXXXXFSDGXNTVXDXXAXXXFIXWLXXTKX

SEQ ID NO: 52 - protein, 33 aa, Artificial Sequence
  intestinotrophic analog of GLP-2
  VARIANT (1)...(1): Xaa = Arg, Lys or His, with an amino terminal group or an amino terminal blocking group
  VARIANT (2)...(2): Xaa = His or Tyr
  VARIANT (3)...(3): Xaa = is Ala, Gly, D-Ala, Pro, Ile, Nva (Norvaline), alpha -aminobutyric acid, or an Ala-replacement amino acid conferring on said analog resistance to DPP-IV enzyme
  VARIANT (4)...(4): Xaa = Asp, Glu, Pro or Hpro (hydroxyproline); or Xaa-Xaa in positions 3 and 4 taken together are Xaa(psi)(CH(OH)CH2)Xaa; Xaa(psi)(CH2NH2)Xaa or Xaa(psi)(CHCH)Xaa
  VARIANT (5)...(5): Xaa = Gly or Ala
  VARIANT (6)...(6): Xaa = Ser or Ala
  VARIANT (11)...(11): Xaa = Met, Leu, Ile or an oxidatively stable Met-replacement amino acid
  VARIANT (15)...(15): Xaa = Leu or Lys
  VARIANT (17)...(17): Xaa = Asn, Lys or Ala
  VARIANT (18)...(18): Xaa = Leu or Lys
  VARIANT (20)...(20): Xaa = Ala or Thr
  VARIANT (21)...(21): Xaa = Arg, Lys, His or Ala
  VARIANT (22)...(22): Xaa = Asp or Lys
  VARIANT (25)...(25): Xaa = Asn or Ala
  VARIANT (28)...(28): Xaa = Ile or Leu
  VARIANT (29)...(29): Xaa = Gln or His
  VARIANT (32)...(32): Xaa = Arg, Lys or His
  VARIANT (33)...(33): Xaa = Arg, Lys or His with a COOH, CONH2 or a C-terminal blocking group
XXXXXXFSDGXNTVXDXXAXXXFIXWLXXTKXX

SEQ ID NO: 53 - protein, 32 aa, Artificial Sequence
  intestinotrophic analog of GLP-2
  VARIANT (1)...(1): Xaa = Arg, Lys or His, with an amino terminal group or an amino terminal blocking group
  VARIANT (2)...(2): Xaa = Arg, Lys or His
  VARIANT (3)...(3): Xaa = His or Tyr
  VARIANT (4)...(4): Xaa = is Ala, Gly, D-Ala, Pro, Ile, Nva (Norvaline), alpha -aminobutyric acid, or an Ala-replacement amino acid conferring on said analog resistance to DPP-IV enzyme
  VARIANT (5)...(5): Xaa = Asp, Glu, Pro or Hpro (hydroxyproline); or Xaa-Xaa in positions 4 and 5 taken together are Xaa(psi)(CH(OH)CH2)Xaa; Xaa(psi)(CH2NH2)Xaa or Xaa(psi)(CHCH)Xaa
  VARIANT (6)...(6): Xaa = Gly or Ala
  VARIANT (7)...(7): Xaa = Ser or Ala
  VARIANT (12)...(12): Xaa = Met, Leu, Ile or an oxidatively stable Met-replacement amino acid
  VARIANT (16)...(16): Xaa = Leu or Lys
  VARIANT (18)...(18): Xaa = Asn, Lys or Ala
  VARIANT (19)...(19): Xaa = Leu or Lys
  VARIANT (21)...(21): Xaa = Ala or Thr
  VARIANT (22)...(22): Xaa = Arg, Lys, His or Ala
  VARIANT (23)...(23): Xaa = Asp or Lys
  VARIANT (26)...(26): Xaa = Asn or Ala
  VARIANT (29)...(29): Xaa = Ile or Leu
  VARIANT (30)...(30): Xaa = Gln or His
XXXXXXXFSDGXNTVXDXXAXXXFIXWLXXTK

SEQ ID NO: 54 - protein, 33 aa, Artificial Sequence
  intestinotrophic analog of GLP-2
  VARIANT (1)...(1): Xaa = Arg, Lys or His, with an amino terminal group or an amino terminal blocking group
  VARIANT (2)...(2): Xaa = Arg, Lys or His
  VARIANT (3)...(3): Xaa = His or Tyr
  VARIANT (4)...(4): Xaa = is Ala, Gly, D-Ala, Pro, Ile, Nva (Norvaline), alpha -aminobutyric acid, or an Ala-replacement amino acid conferring on said analog resistance to DPP-IV enzyme
  VARIANT (5)...(5): Xaa = Asp, Glu, Pro or Hpro (hydroxyproline); or Xaa-Xaa in positions 4 and 5 taken together are Xaa(psi)(CH(OH)CH2)Xaa; Xaa(psi)(CH2NH2)Xaa or Xaa(psi)(CHCH)Xaa
  VARIANT (6)...(6): Xaa = Gly or Ala
  VARIANT (7)...(7): Xaa = Ser or Ala
  VARIANT (12)...(12): Xaa = Met, Leu, Ile or an oxidatively stable Met-replacement amino acid
  VARIANT (16)...(16): Xaa = Leu or Lys
  VARIANT (18)...(18): Xaa = Asn, Lys or Ala
  VARIANT (19)...(19): Xaa = Leu or Lys
  VARIANT (21)...(21): Xaa = Ala or Thr
  VARIANT (22)...(22): Xaa = Arg, Lys, His or Ala
  VARIANT (23)...(23): Xaa = Asp or Lys
  VARIANT (26)...(26): Xaa = Asn or Ala
  VARIANT (29)...(29): Xaa = Ile or Leu
  VARIANT (30)...(30): Xaa = Gln or His
  VARIANT (33)...(33): Xaa = Arg, Lys or His with a COOH, CONH2 or a C-terminal blocking group
XXXXXXXFSDGXNTVXDXXAXXXFIXWLXXTKX

SEQ ID NO: 55 - protein, 34 aa, Artificial Sequence
  intestinotrophic analog of GLP-2
  VARIANT (1)...(1): Xaa = Arg, Lys or His, with an amino terminal group or an amino terminal blocking group
  VARIANT (2)...(2): Xaa = Arg, Lys or His
  VARIANT (3)...(3): Xaa = His or Tyr
  VARIANT (4)...(4): Xaa = is Ala, Gly, D-Ala, Pro, Ile, Nva (Norvaline), alpha -aminobutyric acid, or an Ala-replacement amino acid conferring on said analog resistance to DPP-IV enzyme
  VARIANT (5)...(5): Xaa = Asp, Glu, Pro or Hpro (hydroxyproline); or Xaa-Xaa in positions 4 and 5 taken together are Xaa(psi)(CH(OH)CH2)Xaa; Xaa(psi)(CH2NH2)Xaa or Xaa(psi)(CHCH)Xaa
  VARIANT (6)...(6): Xaa = Gly or Ala
  VARIANT (7)...(7): Xaa = Ser or Ala
  VARIANT (12)...(12): Xaa = Met, Leu, Ile or an oxidatively stable Met-replacement amino acid
  VARIANT (16)...(16): Xaa = Leu or Lys
  VARIANT (18)...(18): Xaa = Asn, Lys or Ala
  VARIANT (19)...(19): Xaa = Leu or Lys
  VARIANT (21)...(21): Xaa = Ala or Thr
  VARIANT (22)...(22): Xaa = Arg, Lys, His or Ala
  VARIANT (23)...(23): Xaa = Asp or Lys
  VARIANT (26)...(26): Xaa = Asn or Ala
  VARIANT (29)...(29): Xaa = Ile or Leu
  VARIANT (30)...(30): Xaa = Gln or His
  VARIANT (33)...(33): Xaa = Arg, Lys or His
  VARIANT (34)...(34): Xaa = Arg, Lys or His with a COOH, CONH2 or a C-terminal blocking group
XXXXXXXFSDGXNTVXDXXAXXXFIXWLXXTKXX

SEQ ID NO: 56 - protein, 30 aa, Artificial Sequence
  intestinotrophic analog of GLP-2
  VARIANT (1)...(1): Xaa = His or Tyr, with an amino terminal group or an amino terminal blocking group
  VARIANT (2)...(2): Xaa = is Ala, Gly, D-Ala, Pro, Ile, Nva (Norvaline), alpha -aminobutyric acid, or an Ala-replacement amino acid conferring on said analog resistance to DPP-IV enzyme
  VARIANT (3)...(3): Xaa = Asp, Glu, Pro or Hpro (hydroxyproline); or Xaa-Xaa in positions 2 and 3 taken together are Xaa(psi)(CH(OH)CH2)Xaa; Xaa(psi)(CH2NH2)Xaa or Xaa(psi)(CHCH)Xaa
  VARIANT (4)...(4): Xaa = Gly or Ala
  VARIANT (5)...(5): Xaa = Ser or Ala
  VARIANT (10)...(10): Xaa = Met, Leu, Ile or an oxidatively stable Met-replacement amino acid
  VARIANT (14)...(14): Xaa = Leu or Lys
  VARIANT (16)...(16): Xaa = Asn, Lys or Ala
  VARIANT (17)...(17): Xaa = Leu or Lys
  VARIANT (19)...(19): Xaa = Ala or Thr
  VARIANT (20)...(20): Xaa = Arg, Lys, His or Ala
  VARIANT (21)...(21): Xaa = Asp or Lys
  VARIANT (27)...(27): Xaa = Ile or Leu
  VARIANT (28)...(28): Xaa = Gln or His
XXXXXFSDGXNTVXDXXAXXXFVQWLXXTK

SEQ ID NO: 57 - protein, 31 aa, Artificial Sequence
  intestinotrophic analog of GLP-2
  VARIANT (1)...(1): Xaa = His or Tyr, with an amino terminal group or an amino terminal blocking group
  VARIANT (2)...(2): Xaa = is Ala, Gly, D-Ala, Pro, Ile, Nva (Norvaline), alpha -aminobutyric acid, or an Ala-replacement amino acid conferring on said analog resistance to DPP-IV enzyme
  VARIANT (3)...(3): Xaa = Asp, Glu, Pro or Hpro (hydroxyproline); or Xaa-Xaa in positions 2 and 3 taken together are Xaa(psi)(CH(OH)CH2)Xaa; Xaa(psi)(CH2NH2)Xaa or Xaa(psi)(CHCH)Xaa
  VARIANT (4)...(4): Xaa = Gly or Ala
  VARIANT (5)...(5): Xaa = Ser or Ala
  VARIANT (10)...(10): Xaa = Met, Leu, Ile or an oxidatively stable Met-replacement amino acid
  VARIANT (14)...(14): Xaa = Leu or Lys
  VARIANT (16)...(16): Xaa = Asn, Lys or Ala
  VARIANT (17)...(17): Xaa = Leu or Lys
  VARIANT (19)...(19): Xaa = Ala or Thr
  VARIANT (20)...(20): Xaa = Arg, Lys, His or Ala
  VARIANT (21)...(21): Xaa = Asp or Lys
  VARIANT (27)...(27): Xaa = Ile or Leu
  VARIANT (28)...(28): Xaa = Gln or His
  VARIANT (31)...(31): Xaa = Arg, Lys or His with a COOH, CONH2 or a C-terminal blocking group
XXXXXFSDGXNTVXDXXAXXXFVQWLXXTKX

SEQ ID NO: 58 - protein, 32 aa, Artificial Sequence
  intestinotrophic analog of GLP-2
  VARIANT (1)...(1): Xaa = His or Tyr, with an amino terminal group or an amino terminal blocking group
  VARIANT (2)...(2): Xaa = is Ala, Gly, D-Ala, Pro, Ile, Nva (Norvaline), alpha -aminobutyric acid, or an Ala-replacement amino acid conferring on said analog resistance to DPP-IV enzyme
  VARIANT (3)...(3): Xaa = Asp, Glu, Pro or Hpro (hydroxyproline); or Xaa-Xaa in positions 2 and 3 taken together are Xaa(psi)(CH(OH)CH2)Xaa; Xaa(psi)(CH2NH2)Xaa or Xaa(psi)(CHCH)Xaa
  VARIANT (4)...(4): Xaa = Gly or Ala
  VARIANT (5)...(5): Xaa = Ser or Ala
  VARIANT (10)...(10): Xaa = Met, Leu, Ile or an oxidatively stable Met-replacement amino acid
  VARIANT (14)...(14): Xaa = Leu or Lys
  VARIANT (16)...(16): Xaa = Asn, Lys or Ala
  VARIANT (17)...(17): Xaa = Leu or Lys
  VARIANT (19)...(19): Xaa = Ala or Thr
  VARIANT (20)...(20): Xaa = Arg, Lys, His or Ala
  VARIANT (21)...(21): Xaa = Asp or Lys
  VARIANT (27)...(27): Xaa = Ile or Leu
  VARIANT (28)...(28): Xaa = Gln or His
  VARIANT (31)...(31): Xaa = Arg, Lys or His
  VARIANT (32)...(32): Xaa = Arg, Lys or His with a COOH, CONH2 or a C-terminal blocking group
XXXXXFSDGXNTVXDXXAXXXFVQWLXXTKXX

SEQ ID NO: 59 - protein, 31 aa, Artificial Sequence
  intestinotrophic analog of GLP-2
  VARIANT (1)...(1): Xaa = Arg, Lys or His, with an amino terminal group or an amino terminal blocking group
  VARIANT (2)...(2): Xaa = His or Tyr
  VARIANT (3)...(3): Xaa = is Ala, Gly, D-Ala, Pro, Ile, Nva (Norvaline), alpha -aminobutyric acid, or an Ala-replacement amino acid conferring on said analog resistance to DPP-IV enzyme
  VARIANT (4)...(4): Xaa = Asp, Glu, Pro or Hpro (hydroxyproline); or Xaa-Xaa in positions 3 and 4 taken together are Xaa(psi)(CH(OH)CH2)Xaa; Xaa(psi)(CH2NH2)Xaa or Xaa(psi)(CHCH)Xaa
  VARIANT (5)...(5): Xaa = Gly or Ala
  VARIANT (6)...(6): Xaa = Ser or Ala
  VARIANT (11)...(11): Xaa = Met, Leu, Ile or an oxidatively stable Met-replacement amino acid
  VARIANT (15)...(15): Xaa = Leu or Lys
  VARIANT (17)...(17): Xaa = Asn, Lys or Ala
  VARIANT (18)...(18): Xaa = Leu or Lys
  VARIANT (20)...(20): Xaa = Ala or Thr
  VARIANT (21)...(21): Xaa = Arg, Lys, His or Ala
  VARIANT (22)...(22): Xaa = Asp or Lys
  VARIANT (28)...(28): Xaa = Ile or Leu
  VARIANT (29)...(29): Xaa = Gln or His
XXXXXXFSDGXNTVXDXXAXXXFVQWLXXTK

SEQ ID NO: 60 - protein, 32 aa, Artificial Sequence
  intestinotrophic analog of GLP-2
  VARIANT (1)...(1): Xaa = Arg, Lys or His, with an amino terminal group or an amino terminal blocking group
  VARIANT (2)...(2): Xaa = His or Tyr
  VARIANT (3)...(3): Xaa = is Ala, Gly, D-Ala, Pro, Ile, Nva (Norvaline), alpha -aminobutyric acid, or an Ala-replacement amino acid conferring on said analog resistance to DPP-IV enzyme
  VARIANT (4)...(4): Xaa = Asp, Glu, Pro or Hpro (hydroxyproline); or Xaa-Xaa in positions 3 and 4 taken together are Xaa(psi)(CH(OH)CH2)Xaa; Xaa(psi)(CH2NH2)Xaa or Xaa(psi)(CHCH)Xaa
  VARIANT (5)...(5): Xaa = Gly or Ala
  VARIANT (6)...(6): Xaa = Ser or Ala
  VARIANT (11)...(11): Xaa = Met, Leu, Ile or an oxidatively stable Met-replacement amino acid
  VARIANT (15)...(15): Xaa = Leu or Lys
  VARIANT (17)...(17): Xaa = Asn, Lys or Ala
  VARIANT (18)...(18): Xaa = Leu or Lys
  VARIANT (20)...(20): Xaa = Ala or Thr
  VARIANT (21)...(21): Xaa = Arg, Lys, His or Ala
  VARIANT (22)...(22): Xaa = Asp or Lys
  VARIANT (28)...(28): Xaa = Ile or Leu
  VARIANT (29)...(29): Xaa = Gln or His
  VARIANT (32)...(32): Xaa = Arg, Lys or His with a COOH, CONH2 or a C-terminal blocking group
XXXXXXFSDGXNTVXDXXAXXXFVQWLXXTKX

SEQ ID NO: 61 - protein, 33 aa, Artificial Sequence
  intestinotrophic analog of GLP-2
  VARIANT (1)...(1): Xaa = Arg, Lys or His, with an amino terminal group or an amino terminal blocking group
  VARIANT (2)...(2): Xaa = His or Tyr
  VARIANT (3)...(3): Xaa = is Ala, Gly, D-Ala, Pro, Ile, Nva (Norvaline), alpha -aminobutyric acid, or an Ala-replacement amino acid conferring on said analog resistance to DPP-IV enzyme
  VARIANT (4)...(4): Xaa = Asp, Glu, Pro or Hpro (hydroxyproline); or Xaa-Xaa in positions 3 and 4 taken together are Xaa(psi)(CH(OH)CH2)Xaa; Xaa(psi)(CH2NH2)Xaa or Xaa(psi)(CHCH)Xaa
  VARIANT (5)...(5): Xaa = Gly or Ala
  VARIANT (6)...(6): Xaa = Ser or Ala
  VARIANT (11)...(11): Xaa = Met, Leu, Ile or an oxidatively stable Met-replacement amino acid
  VARIANT (15)...(15): Xaa = Leu or Lys
  VARIANT (17)...(17): Xaa = Asn, Lys or Ala
  VARIANT (18)...(18): Xaa = Leu or Lys
  VARIANT (20)...(20): Xaa = Ala or Thr
  VARIANT (21)...(21): Xaa = Arg, Lys, His or Ala
  VARIANT (22)...(22): Xaa = Asp or Lys
  VARIANT (28)...(28): Xaa = Ile or Leu
  VARIANT (29)...(29): Xaa = Gln or His
  VARIANT (32)...(32): Xaa = Arg, Lys or His
  VARIANT (33)...(33): Xaa = Arg, Lys or His with a COOH, CONH2 or a C-terminal blocking group
XXXXXXFSDGXNTVXDXXAXXXFVQWLXXTKXX

SEQ ID NO: 62 - protein, 32 aa, Artificial Sequence
  intestinotrophic analog of GLP-2
  VARIANT (1)...(1): Xaa = Arg, Lys or His, with an amino terminal group or an amino terminal blocking group
  VARIANT (2)...(2): Xaa = Arg, Lys or His
  VARIANT (3)...(3): Xaa = His or Tyr
  VARIANT (4)...(4): Xaa = is Ala, Gly, D-Ala, Pro, Ile, Nva (Norvaline), alpha -aminobutyric acid, or an Ala-replacement amino acid conferring on said analog resistance to DPP-IV enzyme
  VARIANT (5)...(5): Xaa = Asp, Glu, Pro or Hpro (hydroxyproline); or Xaa-Xaa in positions 4 and 5 taken together are Xaa(psi)(CH(OH)CH2)Xaa; Xaa(psi)(CH2NH2)Xaa or Xaa(psi)(CHCH)Xaa
  VARIANT (6)...(6): Xaa = Gly or Ala
  VARIANT (7)...(7): Xaa = Ser or Ala
  VARIANT (12)...(12): Xaa = Met, Leu, Ile or an oxidatively stable Met-replacement amino acid
  VARIANT (16)...(16): Xaa = Leu or Lys
  VARIANT (18)...(18): Xaa = Asn, Lys or Ala
  VARIANT (19)...(19): Xaa = Leu or Lys
  VARIANT (21)...(21): Xaa = Ala or Thr
  VARIANT (22)...(22): Xaa = Arg, Lys, His or Ala
  VARIANT (23)...(23): Xaa = Asp or Lys
  VARIANT (29)...(29): Xaa = Ile or Leu
  VARIANT (30)...(30): Xaa = Gln or His
XXXXXXXFSDGXNTVXDXXAXXXFVQWLXXTK

SEQ ID NO: 63 - protein, 33 aa, Artificial Sequence
  intestinotrophic analog of GLP-2
  VARIANT (1)...(1): Xaa = Arg, Lys or His, with an amino terminal group or an amino terminal blocking group
  VARIANT (2)...(2): Xaa = Arg, Lys or His
  VARIANT (3)...(3): Xaa = His or Tyr
  VARIANT (4)...(4): Xaa = is Ala, Gly, D-Ala, Pro, Ile, Nva (Norvaline), alpha -aminobutyric acid, or an Ala-replacement amino acid conferring on said analog resistance to DPP-IV enzyme
  VARIANT (5)...(5): Xaa = Asp, Glu, Pro or Hpro (hydroxyproline); or Xaa-Xaa in positions 4 and 5 taken together are Xaa(psi)(CH(OH)CH2)Xaa; Xaa(psi)(CH2NH2)Xaa or Xaa(psi)(CHCH)Xaa
  VARIANT (6)...(6): Xaa = Gly or Ala
  VARIANT (7)...(7): Xaa = Ser or Ala
  VARIANT (12)...(12): Xaa = Met, Leu, Ile or an oxidatively stable Met-replacement amino acid
  VARIANT (16)...(16): Xaa = Leu or Lys
  VARIANT (18)...(18): Xaa = Asn, Lys or Ala
  VARIANT (19)...(19): Xaa = Leu or Lys
  VARIANT (21)...(21): Xaa = Ala or Thr
  VARIANT (22)...(22): Xaa = Arg, Lys, His or Ala
  VARIANT (23)...(23): Xaa = Asp or Lys
  VARIANT (29)...(29): Xaa = Ile or Leu
  VARIANT (30)...(30): Xaa = Gln or His
  VARIANT (33)...(33): Xaa = Arg, Lys or His with a COOH, CONH2 or a C-terminal blocking group
XXXXXXXFSDGXNTVXDXXAXXXFVQWLXXTKX

SEQ ID NO: 64 - protein, 34 aa, Artificial Sequence
  intestinotrophic analog of GLP-2
  VARIANT (1)...(1): Xaa = Arg, Lys or His, with an amino terminal group or an amino terminal blocking group
  VARIANT (2)...(2): Xaa = Arg, Lys or His
  VARIANT (3)...(3): Xaa = His or Tyr
  VARIANT (4)...(4): Xaa = is Ala, Gly, D-Ala, Pro, Ile, Nva (Norvaline), alpha -aminobutyric acid, or an Ala-replacement amino acid conferring on said analog resistance to DPP-IV enzyme
  VARIANT (5)...(5): Xaa = Asp, Glu, Pro or Hpro (hydroxyproline); or Xaa-Xaa in positions 4 and 5 taken together are Xaa(psi)(CH(OH)CH2)Xaa; Xaa(psi)(CH2NH2)Xaa or Xaa(psi)(CHCH)Xaa
  VARIANT (6)...(6): Xaa = Gly or Ala
  VARIANT (7)...(7): Xaa = Ser or Ala
  VARIANT (12)...(12): Xaa = Met, Leu, Ile or an oxidatively stable Met-replacement amino acid
  VARIANT (16)...(16): Xaa = Leu or Lys
  VARIANT (18)...(18): Xaa = Asn, Lys or Ala
  VARIANT (19)...(19): Xaa = Leu or Lys
  VARIANT (21)...(21): Xaa = Ala or Thr
  VARIANT (22)...(22): Xaa = Arg, Lys, His or Ala
  VARIANT (23)...(23): Xaa = Asp or Lys
  VARIANT (29)...(29): Xaa = Ile or Leu
  VARIANT (30)...(30): Xaa = Gln or His
  VARIANT (33)...(33): Xaa = Arg, Lys or His
  VARIANT (34)...(34): Xaa = Arg, Lys or His with a COOH, CONH2 or a C-terminal blocking group
XXXXXXXFSDGXNTVXDXXAXXXFVQWLXXTKXX

SEQ ID NO: 65 - protein, 29 aa, Artificial Sequence
  intestinotrophic analog of GLP-2
  VARIANT (1)...(1): Xaa = His or Tyr, with an amino terminal group or an amino terminal blocking group
  VARIANT (2)...(2): Xaa = is Ala, Gly, D-Ala, Pro, Ile, Nva (Norvaline), alpha -aminobutyric acid, or an Ala-replacement amino acid conferring on said analog resistance to DPP-IV enzyme
  VARIANT (3)...(3): Xaa = Asp, Glu, Pro or Hpro (hydroxyproline); or Xaa-Xaa in positions 2 and 3 taken together are Xaa(psi)(CH(OH)CH2)Xaa; Xaa(psi)(CH2NH2)Xaa or Xaa(psi)(CHCH)Xaa
  VARIANT (4)...(4): Xaa = Gly or Ala
  VARIANT (5)...(5): Xaa = Ser or Ala
  VARIANT (13)...(13): Xaa = Leu or Lys
  VARIANT (15)...(15): Xaa = Asn, Lys or Ala
  VARIANT (16)...(16): Xaa = Leu or Lys
  VARIANT (18)...(18): Xaa = Ala or Thr
  VARIANT (19)...(19): Xaa = Arg, Lys, His or Ala
  VARIANT (20)...(20): Xaa = Asp or Lys
  VARIANT (23)...(23): Xaa = Asn or Ala
  VARIANT (26)...(26): Xaa = Ile or Leu
  VARIANT (27)...(27): Xaa = Gln or His
XXXXXFSDYSKYXDXXAXXXFIXWLXXTK

SEQ ID NO: 66 - protein, 30 aa, Artificial Sequence
  intestinotrophic analog of GLP-2
  VARIANT (1)...(1): Xaa = His or Tyr, with an amino terminal group or an amino terminal blocking group
  VARIANT (2)...(2): Xaa = is Ala, Gly, D-Ala, Pro, Ile, Nva (Norvaline), alpha -aminobutyric acid, or an Ala-replacement amino acid conferring on said analog resistance to DPP-IV enzyme
  VARIANT (3)...(3): Xaa = Asp, Glu, Pro or Hpro (hydroxyproline); or Xaa-Xaa in positions 2 and 3 taken together are Xaa(psi)(CH(OH)CH2)Xaa; Xaa(psi)(CH2NH2)Xaa or Xaa(psi)(CHCH)Xaa
  VARIANT (4)...(4): Xaa = Gly or Ala
  VARIANT (5)...(5): Xaa = Ser or Ala
  VARIANT (13)...(13): Xaa = Leu or Lys
  VARIANT (15)...(15): Xaa = Asn, Lys or Ala
  VARIANT (16)...(16): Xaa = Leu or Lys
  VARIANT (18)...(18): Xaa = Ala or Thr
  VARIANT (19)...(19): Xaa = Arg, Lys, His or Ala
  VARIANT (20)...(20): Xaa = Asp or Lys
  VARIANT (23)...(23): Xaa = Asn or Ala
  VARIANT (26)...(26): Xaa = Ile or Leu
  VARIANT (27)...(27): Xaa = Gln or His
  VARIANT (30)...(30): Xaa = Arg, Lys or His with a COOH, CONH2 or a C-terminal blocking group
XXXXXFSDYSKYXDXXAXXXFIXWLXXTKX

SEQ ID NO: 67 - protein, 31 aa, Artificial Sequence
  intestinotrophic analog of GLP-2
  VARIANT (1)...(1): Xaa = His or Tyr, with an amino terminal group or an amino terminal blocking group
  VARIANT (2)...(2): Xaa = is Ala, Gly, D-Ala, Pro, Ile, Nva (Norvaline), alpha -aminobutyric acid, or an Ala-replacement amino acid conferring on said analog resistance to DPP-IV enzyme
  VARIANT (3)...(3): Xaa = Asp, Glu, Pro or Hpro (hydroxyproline); or Xaa-Xaa in positions 2 and 3 taken together are Xaa(psi)(CH(OH)CH2)Xaa; Xaa(psi)(CH2NH2)Xaa or Xaa(psi)(CHCH)Xaa
  VARIANT (4)...(4): Xaa = Gly or Ala
  VARIANT (5)...(5): Xaa = Ser or Ala
  VARIANT (13)...(13): Xaa = Leu or Lys
  VARIANT (15)...(15): Xaa = Asn, Lys or Ala
  VARIANT (16)...(16): Xaa = Leu or Lys
  VARIANT (18)...(18): Xaa = Ala or Thr
  VARIANT (19)...(19): Xaa = Arg, Lys, His or Ala
  VARIANT (20)...(20): Xaa = Asp or Lys
  VARIANT (23)...(23): Xaa = Asn or Ala
  VARIANT (26)...(26): Xaa = Ile or Leu
  VARIANT (27)...(27): Xaa = Gln or His
  VARIANT (30)...(30): Xaa = Arg, Lys or His
  VARIANT (31)...(31): Xaa = Arg, Lys or His with a COOH, CONH2 or a C-terminal blocking group
XXXXXFSDYSKYXDXXAXXXFIXWLXXTKXX

SEQ ID NO: 68 - protein, 30 aa, Artificial Sequence
  intestinotrophic analog of GLP-2
  VARIANT (1)...(1): Xaa = Arg, Lys or His, with an amino terminal group or an amino terminal blocking group
  VARIANT (2)...(2): Xaa = His or Tyr
  VARIANT (3)...(3): Xaa = is Ala, Gly, D-Ala, Pro, Ile, Nva (Norvaline), alpha -aminobutyric acid, or an Ala-replacement amino acid conferring on said analog resistance to DPP-IV enzyme
  VARIANT (4)...(4): Xaa = Asp, Glu, Pro or Hpro (hydroxyproline); or Xaa-Xaa in positions 3 and 4 taken together are Xaa(psi)(CH(OH)CH2)Xaa; Xaa(psi)(CH2NH2)Xaa or Xaa(psi)(CHCH)Xaa
  VARIANT (5)...(5): Xaa = Gly or Ala
  VARIANT (6)...(6): Xaa = Ser or Ala
  VARIANT (14)...(14): Xaa = Leu or Lys
  VARIANT (16)...(16): Xaa = Asn, Lys or Ala
  VARIANT (17)...(17): Xaa = Leu or Lys
  VARIANT (19)...(19): Xaa = Ala or Thr
  VARIANT (20)...(20): Xaa = Arg, Lys, His or Ala
  VARIANT (21)...(21): Xaa = Asp or Lys
  VARIANT (24)...(24): Xaa = Asn or Ala
  VARIANT (27)...(27): Xaa = Ile or Leu
  VARIANT (28)...(28): Xaa = Gln or His
XXXXXXFSDYSKYXDXXAXXXFIXWLXXTK

SEQ ID NO: 69 - protein, 31 aa, Artificial Sequence
  intestinotrophic analog of GLP-2
  VARIANT (1)...(1): Xaa = Arg, Lys or His, with an amino terminal group or an amino terminal blocking group
  VARIANT (2)...(2): Xaa = His or Tyr
  VARIANT (3)...(3): Xaa = is Ala, Gly, D-Ala, Pro, Ile, Nva (Norvaline), alpha -aminobutyric acid, or an Ala-replacement amino acid conferring on said analog resistance to DPP-IV enzyme
  VARIANT (4)...(4): Xaa = Asp, Glu, Pro or Hpro (hydroxyproline); or Xaa-Xaa in positions 3 and 4 taken together are Xaa(psi)(CH(OH)CH2)Xaa; Xaa(psi)(CH2NH2)Xaa or Xaa(psi)(CHCH)Xaa
  VARIANT (5)...(5): Xaa = Gly or Ala
  VARIANT (6)...(6): Xaa = Ser or Ala
  VARIANT (14)...(14): Xaa = Leu or Lys
  VARIANT (16)...(16): Xaa = Asn, Lys or Ala
  VARIANT (17)...(17): Xaa = Leu or Lys
  VARIANT (19)...(19): Xaa = Ala or Thr
  VARIANT (20)...(20): Xaa = Arg, Lys, His or Ala
  VARIANT (21)...(21): Xaa = Asp or Lys
  VARIANT (24)...(24): Xaa = Asn or Ala
  VARIANT (27)...(27): Xaa = Ile or Leu
  VARIANT (28)...(28): Xaa = Gln or His
  VARIANT (31)...(31): Xaa = Arg, Lys or His with a COOH, CONH2 or a C-terminal blocking group
XXXXXXFSDYSKYXDXXAXXXFIXWLXXTKX

SEQ ID NO: 70 - protein, 32 aa, Artificial Sequence
  intestinotrophic analog of GLP-2
  VARIANT (1)...(1): Xaa = Arg, Lys or His, with an amino terminal group or an amino terminal blocking group
  VARIANT (2)...(2): Xaa = His or Tyr
  VARIANT (3)...(3): Xaa = is Ala, Gly, D-Ala, Pro, Ile, Nva (Norvaline), alpha -aminobutyric acid, or an Ala-replacement amino acid conferring on said analog resistance to DPP-IV enzyme
  VARIANT (4)...(4): Xaa = Asp, Glu, Pro or Hpro (hydroxyproline); or Xaa-Xaa in positions 3 and 4 taken together are Xaa(psi)(CH(OH)CH2)Xaa; Xaa(psi)(CH2NH2)Xaa or Xaa(psi)(CHCH)Xaa
  VARIANT (5)...(5): Xaa = Gly or Ala
  VARIANT (6)...(6): Xaa = Ser or Ala
  VARIANT (14)...(14): Xaa = Leu or Lys
  VARIANT (16)...(16): Xaa = Asn, Lys or Ala
  VARIANT (17)...(17): Xaa = Leu or Lys
  VARIANT (19)...(19): Xaa = Ala or Thr
  VARIANT (20)...(20): Xaa = Arg, Lys, His or Ala
  VARIANT (21)...(21): Xaa = Asp or Lys
  VARIANT (24)...(24): Xaa = Asn or Ala
  VARIANT (27)...(27): Xaa = Ile or Leu
  VARIANT (28)...(28): Xaa = Gln or His
  VARIANT (31)...(31): Xaa = Arg, Lys or His
  VARIANT (32)...(32): Xaa = Arg, Lys or His with a COOH, CONH2 or a C-terminal blocking group
XXXXXXFSDYSKYXDXXAXXXFIXWLXXTKXX

SEQ ID NO: 71 - protein, 31 aa, Artificial Sequence
  intestinotrophic analog of GLP-2
  VARIANT (1)...(1): Xaa = Arg, Lys or His, with an amino terminal group or an amino terminal blocking group
  VARIANT (2)...(2): Xaa = Arg, Lys or His
  VARIANT (3)...(3): Xaa = His or Tyr
  VARIANT (4)...(4): Xaa = is Ala, Gly, D-Ala, Pro, Ile, Nva (Norvaline), alpha -aminobutyric acid, or an Ala-replacement amino acid conferring on said analog resistance to DPP-IV enzyme
  VARIANT (5)...(5): Xaa = Asp, Glu, Pro or Hpro (hydroxyproline); or Xaa-Xaa in positions 4 and 5 taken together are Xaa(psi)(CH(OH)CH2)Xaa; Xaa(psi)(CH2NH2)Xaa or Xaa(psi)(CHCH)Xaa
  VARIANT (6)...(6): Xaa = Gly or Ala
  VARIANT (7)...(7): Xaa = Ser or Ala
  VARIANT (15)...(15): Xaa = Leu or Lys
  VARIANT (17)...(17): Xaa = Asn, Lys or Ala
  VARIANT (18)...(18): Xaa = Leu or Lys
  VARIANT (20)...(20): Xaa = Ala or Thr
  VARIANT (21)...(21): Xaa = Arg, Lys, His or Ala
  VARIANT (22)...(22): Xaa = Asp or Lys
  VARIANT (25)...(25): Xaa = Asn or Ala
  VARIANT (28)...(28): Xaa = Ile or Leu
  VARIANT (29)...(29): Xaa = Gln or His
XXXXXXXFSDYSKYXDXXAXXXFIXWLXXTK

SEQ ID NO: 72 - protein, 32 aa, Artificial Sequence
  intestinotrophic analog of GLP-2
  VARIANT (1)...(1): Xaa = Arg, Lys or His, with an amino terminal group or an amino terminal blocking group
  VARIANT (2)...(2): Xaa = Arg, Lys or His
  VARIANT (3)...(3): Xaa = His or Tyr
  VARIANT (4)...(4): Xaa = is Ala, Gly, D-Ala, Pro, Ile, Nva (Norvaline), alpha -aminobutyric acid, or an Ala-replacement amino acid conferring on said analog resistance to DPP-IV enzyme
  VARIANT (5)...(5): Xaa = Asp, Glu, Pro or Hpro (hydroxyproline); or Xaa-Xaa in positions 4 and 5 taken together are Xaa(psi)(CH(OH)CH2)Xaa; Xaa(psi)(CH2NH2)Xaa or Xaa(psi)(CHCH)Xaa
  VARIANT (6)...(6): Xaa = Gly or Ala
  VARIANT (7)...(7): Xaa = Ser or Ala
  VARIANT (15)...(15): Xaa = Leu or Lys
  VARIANT (17)...(17): Xaa = Asn, Lys or Ala
  VARIANT (18)...(18): Xaa = Leu or Lys
  VARIANT (20)...(20): Xaa = Ala or Thr
  VARIANT (21)...(21): Xaa = Arg, Lys, His or Ala
  VARIANT (22)...(22): Xaa = Asp or Lys
  VARIANT (25)...(25): Xaa = Asn or Ala
  VARIANT (28)...(28): Xaa = Ile or Leu
  VARIANT (29)...(29): Xaa = Gln or His
  VARIANT (32)...(32): Xaa = Arg, Lys or His with a COOH, CONH2 or a C-terminal blocking group
XXXXXXXFSDYSKYXDXXAXXXFIXWLXXTKX

SEQ ID NO: 73 - protein, 33 aa, Artificial Sequence
  intestinotrophic analog of GLP-2
  VARIANT (1)...(1): Xaa = Arg, Lys or His, with an amino terminal group or an amino terminal blocking group
  VARIANT (2)...(2): Xaa = Arg, Lys or His
  VARIANT (3)...(3): Xaa = His or Tyr
  VARIANT (4)...(4): Xaa = is Ala, Gly, D-Ala, Pro, Ile, Nva (Norvaline), alpha -aminobutyric acid, or an Ala-replacement amino acid conferring on said analog resistance to DPP-IV enzyme
  VARIANT (5)...(5): Xaa = Asp, Glu, Pro or Hpro (hydroxyproline); or Xaa-Xaa in positions 4 and 5 taken together are Xaa(psi)(CH(OH)CH2)Xaa; Xaa(psi)(CH2NH2)Xaa or Xaa(psi)(CHCH)Xaa
  VARIANT (6)...(6): Xaa = Gly or Ala
  VARIANT (7)...(7): Xaa = Ser or Ala
  VARIANT (15)...(15): Xaa = Leu or Lys
  VARIANT (17)...(17): Xaa = Asn, Lys or Ala
  VARIANT (18)...(18): Xaa = Leu or Lys
  VARIANT (20)...(20): Xaa = Ala or Thr
  VARIANT (21)...(21): Xaa = Arg, Lys, His or Ala
  VARIANT (22)...(22): Xaa = Asp or Lys
  VARIANT (25)...(25): Xaa = Asn or Ala
  VARIANT (28)...(28): Xaa = Ile or Leu
  VARIANT (29)...(29): Xaa = Gln or His
  VARIANT (32)...(32): Xaa = Arg, Lys or His
  VARIANT (33)...(33): Xaa = Arg, Lys or His with a COOH, CONH2 or a C-terminal blocking group
XXXXXXXFSDYSKYXDXXAXXXFIXWLXXTKXX

SEQ ID NO: 74 - protein, 29 aa, Artificial Sequence
  intestinotrophic analog of GLP-2
  VARIANT (1)...(1): Xaa = His or Tyr, with an amino terminal group or an amino terminal blocking group
  VARIANT (2)...(2): Xaa = is Ala, Gly, D-Ala, Pro, Ile, Nva (Norvaline), alpha -aminobutyric acid, or an Ala-replacement amino acid conferring on said analog resistance to DPP-IV enzyme
  VARIANT (3)...(3): Xaa = Asp, Glu, Pro or Hpro (hydroxyproline); or Xaa-Xaa in positions 2 and 3 taken together are Xaa(psi)(CH(OH)CH2)Xaa; Xaa(psi)(CH2NH2)Xaa or Xaa(psi)(CHCH)Xaa
  VARIANT (4)...(4): Xaa = Gly or Ala
  VARIANT (5)...(5): Xaa = Ser or Ala
  VARIANT (13)...(13): Xaa = Leu or Lys
  VARIANT (15)...(15): Xaa = Asn, Lys or Ala
  VARIANT (16)...(16): Xaa = Leu or Lys
  VARIANT (18)...(18): Xaa = Ala or Thr
  VARIANT (19)...(19): Xaa = Arg, Lys, His or Ala
  VARIANT (20)...(20): Xaa = Asp or Lys
  VARIANT (26)...(26): Xaa = Ile or Leu
  VARIANT (27)...(27): Xaa = Gln or His
XXXXXFSDYSKYXDXXAXXXFVQWLXXTK

SEQ ID NO: 75 - protein, 30 aa, Artificial Sequence
  intestinotrophic analog of GLP-2
  VARIANT (1)...(1): Xaa = His or Tyr, with an amino terminal group or an amino terminal blocking group
  VARIANT (2)...(2): Xaa = is Ala, Gly, D-Ala, Pro, Ile, Nva (Norvaline), alpha -aminobutyric acid, or an Ala-replacement amino acid conferring on said analog resistance to DPP-IV enzyme
  VARIANT (3)...(3): Xaa = Asp, Glu, Pro or Hpro (hydroxyproline); or Xaa-Xaa in positions 2 and 3 taken together are Xaa(psi)(CH(OH)CH2)Xaa; Xaa(psi)(CH2NH2)Xaa or Xaa(psi)(CHCH)Xaa
  VARIANT (4)...(4): Xaa = Gly or Ala
  VARIANT (5)...(5): Xaa = Ser or Ala
  VARIANT (13)...(13): Xaa = Leu or Lys
  VARIANT (15)...(15): Xaa = Asn, Lys or Ala
  VARIANT (16)...(16): Xaa = Leu or Lys
  VARIANT (18)...(18): Xaa = Ala or Thr
  VARIANT (19)...(19): Xaa = Arg, Lys, His or Ala
  VARIANT (20)...(20): Xaa = Asp or Lys
  VARIANT (26)...(26): Xaa = Ile or Leu
  VARIANT (27)...(27): Xaa = Gln or His
  VARIANT (30)...(30): Xaa = Arg, Lys or His with a COOH, CONH2 or a C-terminal blocking group
XXXXXFSDYSKYXDXXAXXXFVQWLXXTKX

SEQ ID NO: 76 - protein, 31 aa, Artificial Sequence
  intestinotrophic analog of GLP-2
  VARIANT (1)...(1): Xaa = His or Tyr, with an amino terminal group or an amino terminal blocking group
  VARIANT (2)...(2): Xaa = is Ala, Gly, D-Ala, Pro, Ile, Nva (Norvaline), alpha -aminobutyric acid, or an Ala-replacement amino acid conferring on said analog resistance to DPP-IV enzyme
  VARIANT (3)...(3): Xaa = Asp, Glu, Pro or Hpro (hydroxyproline); or Xaa-Xaa in positions 2 and 3 taken together are Xaa(psi)(CH(OH)CH2)Xaa; Xaa(psi)(CH2NH2)Xaa or Xaa(psi)(CHCH)Xaa
  VARIANT (4)...(4): Xaa = Gly or Ala
  VARIANT (5)...(5): Xaa = Ser or Ala
  VARIANT (13)...(13): Xaa = Leu or Lys
  VARIANT (15)...(15): Xaa = Asn, Lys or Ala
  VARIANT (16)...(16): Xaa = Leu or Lys
  VARIANT (18)...(18): Xaa = Ala or Thr
  VARIANT (19)...(19): Xaa = Arg, Lys, His or Ala
  VARIANT (20)...(20): Xaa = Asp or Lys
  VARIANT (26)...(26): Xaa = Ile or Leu
  VARIANT (27)...(27): Xaa = Gln or His
  VARIANT (30)...(30): Xaa = Arg, Lys or His
  VARIANT (31)...(31): Xaa = Arg, Lys or His with a COOH, CONH2 or a C-terminal blocking group
XXXXXFSDYSKYXDXXAXXXFVQWLXXTKXX

SEQ ID NO: 77 - protein, 30 aa, Artificial Sequence
  intestinotrophic analog of GLP-2
  VARIANT (1)...(1): Xaa = Arg, Lys or His, with an amino terminal group or an amino terminal blocking group
  VARIANT (2)...(2): Xaa = His or Tyr
  VARIANT (3)...(3): Xaa = is Ala, Gly, D-Ala, Pro, Ile, Nva (Norvaline), alpha -aminobutyric acid, or an Ala-replacement amino acid conferring on said analog resistance to DPP-IV enzyme
  VARIANT (4)...(4): Xaa = Asp, Glu, Pro or Hpro (hydroxyproline); or Xaa-Xaa in positions 3 and 4 taken together are Xaa(psi)(CH(OH)CH2)Xaa; Xaa(psi)(CH2NH2)Xaa or Xaa(psi)(CHCH)Xaa
  VARIANT (5)...(5): Xaa = Gly or Ala
  VARIANT (6)...(6): Xaa = Ser or Ala
  VARIANT (14)...(14): Xaa = Leu or Lys
  VARIANT (16)...(16): Xaa = Asn, Lys or Ala
  VARIANT (17)...(17): Xaa = Leu or Lys
  VARIANT (19)...(19): Xaa = Ala or Thr
  VARIANT (20)...(20): Xaa = Arg, Lys, His or Ala
  VARIANT (21)...(21): Xaa = Asp or Lys
  VARIANT (27)...(27): Xaa = Ile or Leu
  VARIANT (28)...(28): Xaa = Gln or His
XXXXXXFSDYSKYXDXXAXXXFVQWLXXTK

SEQ ID NO: 78 - protein, 31 aa, Artificial Sequence
  intestinotrophic analog of GLP-2
  VARIANT (1)...(1): Xaa = Arg, Lys or His, with an amino terminal group or an amino terminal blocking group
  VARIANT (2)...(2): Xaa = His or Tyr
  VARIANT (3)...(3): Xaa = is Ala, Gly, D-Ala, Pro, Ile, Nva (Norvaline), alpha -aminobutyric acid, or an Ala-replacement amino acid conferring on said analog resistance to DPP-IV enzyme
  VARIANT (4)...(4): Xaa = Asp, Glu, Pro or Hpro (hydroxyproline); or Xaa-Xaa in positions 3 and 4 taken together are Xaa(psi)(CH(OH)CH2)Xaa; Xaa(psi)(CH2NH2)Xaa or Xaa(psi)(CHCH)Xaa
  VARIANT (5)...(5): Xaa = Gly or Ala
  VARIANT (6)...(6): Xaa = Ser or Ala
  VARIANT (14)...(14): Xaa = Leu or Lys
  VARIANT (16)...(16): Xaa = Asn, Lys or Ala
  VARIANT (17)...(17): Xaa = Leu or Lys
  VARIANT (19)...(19): Xaa = Ala or Thr
  VARIANT (20)...(20): Xaa = Arg, Lys, His or Ala
  VARIANT (21)...(21): Xaa = Asp or Lys
  VARIANT (27)...(27): Xaa = Ile or Leu
  VARIANT (28)...(28): Xaa = Gln or His
  VARIANT (31)...(31): Xaa = Arg, Lys or His with a COOH, CONH2 or a C-terminal blocking group
XXXXXXFSDYSKYXDXXAXXXFVQWLXXTKX

SEQ ID NO: 79 - protein, 32 aa, Artificial Sequence
  intestinotrophic analog of GLP-2
  VARIANT (1)...(1): Xaa = Arg, Lys or His, with an amino terminal group or an amino terminal blocking group
  VARIANT (2)...(2): Xaa = His or Tyr
  VARIANT (3)...(3): Xaa = is Ala, Gly, D-Ala, Pro, Ile, Nva (Norvaline), alpha -aminobutyric acid, or an Ala-replacement amino acid conferring on said analog resistance to DPP-IV enzyme
  VARIANT (4)...(4): Xaa = Asp, Glu, Pro or Hpro (hydroxyproline); or Xaa-Xaa in positions 3 and 4 taken together are Xaa(psi)(CH(OH)CH2)Xaa; Xaa(psi)(CH2NH2)Xaa or Xaa(psi)(CHCH)Xaa
  VARIANT (5)...(5): Xaa = Gly or Ala
  VARIANT (6)...(6): Xaa = Ser or Ala
  VARIANT (14)...(14): Xaa = Leu or Lys
  VARIANT (16)...(16): Xaa = Asn, Lys or Ala
  VARIANT (17)...(17): Xaa = Leu or Lys
  VARIANT (19)...(19): Xaa = Ala or Thr
  VARIANT (20)...(20): Xaa = Arg, Lys, His or Ala
  VARIANT (21)...(21): Xaa = Asp or Lys
  VARIANT (27)...(27): Xaa = Ile or Leu
  VARIANT (28)...(28): Xaa = Gln or His
  VARIANT (31)...(31): Xaa = Arg, Lys or His
  VARIANT (32)...(32): Xaa = Arg, Lys or His with a COOH, CONH2 or a C-terminal blocking group
XXXXXXFSDYSKYXDXXAXXXFVQWLXXTKXX

SEQ ID NO: 80 - protein, 31 aa, Artificial Sequence
  intestinotrophic analog of GLP-2
  VARIANT (1)...(1): Xaa = Arg, Lys or His, with an amino terminal group or an amino terminal blocking group
  VARIANT (2)...(2): Xaa = Arg, Lys or His
  VARIANT (3)...(3): Xaa = His or Tyr
  VARIANT (4)...(4): Xaa = is Ala, Gly, D-Ala, Pro, Ile, Nva (Norvaline), alpha -aminobutyric acid, or an Ala-replacement amino acid conferring on said analog resistance to DPP-IV enzyme
  VARIANT (5)...(5): Xaa = Asp, Glu, Pro or Hpro (hydroxyproline); or Xaa-Xaa in positions 4 and 5 taken together are Xaa(psi)(CH(OH)CH2)Xaa; Xaa(psi)(CH2NH2)Xaa or Xaa(psi)(CHCH)Xaa
  VARIANT (6)...(6): Xaa = Gly or Ala
  VARIANT (7)...(7): Xaa = Ser or Ala
  VARIANT (15)...(15): Xaa = Leu or Lys
  VARIANT (17)...(17): Xaa = Asn, Lys or Ala
  VARIANT (18)...(18): Xaa = Leu or Lys
  VARIANT (20)...(20): Xaa = Ala or Thr
  VARIANT (21)...(21): Xaa = Arg, Lys, His or Ala
  VARIANT (22)...(22): Xaa = Asp or Lys
  VARIANT (28)...(28): Xaa = Ile or Leu
  VARIANT (29)...(29): Xaa = Gln or His
XXXXXXXFSDYSKYXDXXAXXXFVQWLXXTK

SEQ ID NO: 81 - protein, 32 aa, Artificial Sequence
  intestinotrophic analog of GLP-2
  VARIANT (1)...(1): Xaa = Arg, Lys or His, with an amino terminal group or an amino terminal blocking group
  VARIANT (2)...(2): Xaa = Arg, Lys or His
  VARIANT (3)...(3): Xaa = His or Tyr
  VARIANT (4)...(4): Xaa = is Ala, Gly, D-Ala, Pro, Ile, Nva (Norvaline), alpha -aminobutyric acid, or an Ala-replacement amino acid conferring on said analog resistance to DPP-IV enzyme
  VARIANT (5)...(5): Xaa = Asp, Glu, Pro or Hpro (hydroxyproline); or Xaa-Xaa in positions 4 and 5 taken together are Xaa(psi)(CH(OH)CH2)Xaa; Xaa(psi)(CH2NH2)Xaa or Xaa(psi)(CHCH)Xaa
  VARIANT (6)...(6): Xaa = Gly or Ala
  VARIANT (7)...(7): Xaa = Ser or Ala
  VARIANT (15)...(15): Xaa = Leu or Lys
  VARIANT (17)...(17): Xaa = Asn, Lys or Ala
  VARIANT (18)...(18): Xaa = Leu or Lys
  VARIANT (20)...(20): Xaa = Ala or Thr
  VARIANT (21)...(21): Xaa = Arg, Lys, His or Ala
  VARIANT (22)...(22): Xaa = Asp or Lys
  VARIANT (28)...(28): Xaa = Ile or Leu
  VARIANT (29)...(29): Xaa = Gln or His
  VARIANT (32)...(32): Xaa = Arg, Lys or His with a COOH, CONH2 or a C-terminal blocking group
XXXXXXXFSDYSKYXDXXAXXXFVQWLXXTKX

SEQ ID NO: 82 - protein, 33 aa, Artificial Sequence
  intestinotrophic analog of GLP-2
  VARIANT (1)...(1): Xaa = Arg, Lys or His, with an amino terminal group or an amino terminal blocking group
  VARIANT (2)...(2): Xaa = Arg, Lys or His
  VARIANT (3)...(3): Xaa = His or Tyr
  VARIANT (4)...(4): Xaa = is Ala, Gly, D-Ala, Pro, Ile, Nva (Norvaline), alpha -aminobutyric acid, or an Ala-replacement amino acid conferring on said analog resistance to DPP-IV enzyme
  VARIANT (5)...(5): Xaa = Asp, Glu, Pro or Hpro (hydroxyproline); or Xaa-Xaa in positions 4 and 5 taken together are Xaa(psi)(CH(OH)CH2)Xaa; Xaa(psi)(CH2NH2)Xaa or Xaa(psi)(CHCH)Xaa
  VARIANT (6)...(6): Xaa = Gly or Ala
  VARIANT (7)...(7): Xaa = Ser or Ala
  VARIANT (15)...(15): Xaa = Leu or Lys
  VARIANT (17)...(17): Xaa = Asn, Lys or Ala
  VARIANT (18)...(18): Xaa = Leu or Lys
  VARIANT (20)...(20): Xaa = Ala or Thr
  VARIANT (21)...(21): Xaa = Arg, Lys, His or Ala
  VARIANT (22)...(22): Xaa = Asp or Lys
  VARIANT (28)...(28): Xaa = Ile or Leu
  VARIANT (29)...(29): Xaa = Gln or His
  VARIANT (32)...(32): Xaa = Arg, Lys or His
  VARIANT (33)...(33): Xaa = Arg, Lys or His with a COOH, CONH2 or a C-terminal blocking group
XXXXXXXFSDYSKYXDXXAXXXFVQWLXXTKXX

SEQ ID NO: 83 - protein, 31 aa, Artificial Sequence
  intestinotrophic analog of GLP-2
  VARIANT (1)...(1): Xaa = His or Tyr, with an amino terminal group or an amino terminal blocking group
  VARIANT (2)...(2): Xaa = is Ala, Gly, D-Ala, Pro, Ile, Nva (Norvaline), alpha -aminobutyric acid, or an Ala-replacement amino acid conferring on said analog resistance to DPP-IV enzyme
  VARIANT (3)...(3): Xaa = Asp, Glu, Pro or Hpro (hydroxyproline); or Xaa-Xaa in positions 2 and 3 taken together are Xaa(psi)(CH(OH)CH2)Xaa; Xaa(psi)(CH2NH2)Xaa or Xaa(psi)(CHCH)Xaa
  VARIANT (4)...(4): Xaa = Gly or Ala
  VARIANT (5)...(5): Xaa = Ser or Ala
  VARIANT (10)...(10): Xaa = Met, Leu, Ile or an oxidatively stable Met-replacement amino acid
  VARIANT (14)...(14): Xaa = Leu or Lys
  VARIANT (16)...(16): Xaa = Asn, Lys or Ala
  VARIANT (17)...(17): Xaa = Leu or Lys
  VARIANT (19)...(19): Xaa = Ala or Thr
  VARIANT (20)...(20): Xaa = Arg, Lys, His or Ala
  VARIANT (21)...(21): Xaa = Asp or Lys
  VARIANT (24)...(24): Xaa = Asn or Ala
  VARIANT (27)...(27): Xaa = Ile or Leu
  VARIANT (28)...(28): Xaa = Gln or His
XXXXXFSDEXNTIXDXXAXXXFIXWLXXTKI

SEQ ID NO: 84 - protein, 32 aa, Artificial Sequence
  intestinotrophic analog of GLP-2
  VARIANT (1)...(1): Xaa = His or Tyr, with an amino terminal group or an amino terminal blocking group
  VARIANT (2)...(2): Xaa = is Ala, Gly, D-Ala, Pro, Ile, Nva (Norvaline), alpha -aminobutyric acid, or an Ala-replacement amino acid conferring on said analog resistance to DPP-IV enzyme
  VARIANT (3)...(3): Xaa = Asp, Glu, Pro or Hpro (hydroxyproline); or Xaa-Xaa in positions 2 and 3 taken together are Xaa(psi)(CH(OH)CH2)Xaa; Xaa(psi)(CH2NH2)Xaa or Xaa(psi)(CHCH)Xaa
  VARIANT (4)...(4): Xaa = Gly or Ala
  VARIANT (5)...(5): Xaa = Ser or Ala
  VARIANT (10)...(10): Xaa = Met, Leu, Ile or an oxidatively stable Met-replacement amino acid
  VARIANT (14)...(14): Xaa = Leu or Lys
  VARIANT (16)...(16): Xaa = Asn, Lys or Ala
  VARIANT (17)...(17): Xaa = Leu or Lys
  VARIANT (19)...(19): Xaa = Ala or Thr
  VARIANT (20)...(20): Xaa = Arg, Lys, His or Ala
  VARIANT (21)...(21): Xaa = Asp or Lys
  VARIANT (24)...(24): Xaa = Asn or Ala
  VARIANT (27)...(27): Xaa = Ile or Leu
  VARIANT (28)...(28): Xaa = Gln or His
  VARIANT (32)...(32): Xaa = Arg, Lys or His with a COOH, CONH2 or a C-terminal blocking group
XXXXXFSDEXNTIXDXXAXXXFIXWLXXTKIX

SEQ ID NO: 85 - protein, 33 aa, Artificial Sequence
  intestinotrophic analog of GLP-2
  VARIANT (1)...(1): Xaa = His or Tyr, with an amino terminal group or an amino terminal blocking group
  VARIANT (2)...(2): Xaa = is Ala, Gly, D-Ala, Pro, Ile, Nva (Norvaline), alpha -aminobutyric acid, or an Ala-replacement amino acid conferring on said analog resistance to DPP-IV enzyme
  VARIANT (3)...(3): Xaa = Asp, Glu, Pro or Hpro (hydroxyproline); or Xaa-Xaa in positions 2 and 3 taken together are Xaa(psi)(CH(OH)CH2)Xaa; Xaa(psi)(CH2NH2)Xaa or Xaa(psi)(CHCH)Xaa
  VARIANT (4)...(4): Xaa = Gly or Ala
  VARIANT (5)...(5): Xaa = Ser or Ala
  VARIANT (10)...(10): Xaa = Met, Leu, Ile or an oxidatively stable Met-replacement amino acid
  VARIANT (14)...(14): Xaa = Leu or Lys
  VARIANT (16)...(16): Xaa = Asn, Lys or Ala
  VARIANT (17)...(17): Xaa = Leu or Lys
  VARIANT (19)...(19): Xaa = Ala or Thr
  VARIANT (20)...(20): Xaa = Arg, Lys, His or Ala
  VARIANT (21)...(21): Xaa = Asp or Lys
  VARIANT (24)...(24): Xaa = Asn or Ala
  VARIANT (27)...(27): Xaa = Ile or Leu
  VARIANT (28)...(28): Xaa = Gln or His
  VARIANT (32)...(32): Xaa = Arg, Lys or His
  VARIANT (33)...(33): Xaa = Arg, Lys or His with a COOH, CONH2 or a C-terminal blocking group
XXXXXFSDEXNTIXDXXAXXXFIXWLXXTKIXX

SEQ ID NO: 86 - protein, 32 aa, Artificial Sequence
  intestinotrophic analog of GLP-2
  VARIANT (1)...(1): Xaa = Arg, Lys or His, with an amino terminal group or an amino terminal blocking group
  VARIANT (2)...(2): Xaa = His or Tyr
  VARIANT (3)...(3): Xaa = is Ala, Gly, D-Ala, Pro, Ile, Nva (Norvaline), alpha -aminobutyric acid, or an Ala-replacement amino acid conferring on said analog resistance to DPP-IV enzyme
  VARIANT (4)...(4): Xaa = Asp, Glu, Pro or Hpro (hydroxyproline); or Xaa-Xaa in positions 3 and 4 taken together are Xaa(psi)(CH(OH)CH2)Xaa; Xaa(psi)(CH2NH2)Xaa or Xaa(psi)(CHCH)Xaa
  VARIANT (5)...(5): Xaa = Gly or Ala
  VARIANT (6)...(6): Xaa = Ser or Ala
  VARIANT (11)...(11): Xaa = Met, Leu, Ile or an oxidatively stable Met-replacement amino acid
  VARIANT (15)...(15): Xaa = Leu or Lys
  VARIANT (17)...(17): Xaa = Asn, Lys or Ala
  VARIANT (18)...(18): Xaa = Leu or Lys
  VARIANT (20)...(20): Xaa = Ala or Thr
  VARIANT (21)...(21): Xaa = Arg, Lys, His or Ala
  VARIANT (22)...(22): Xaa = Asp or Lys
  VARIANT (25)...(25): Xaa = Asn or Ala
  VARIANT (28)...(28): Xaa = Ile or Leu
  VARIANT (29)...(29): Xaa = Gln or His
XXXXXXFSDEXNTIXDXXAXXXFIXWLXXTKI

SEQ ID NO: 87 - protein, 33 aa, Artificial Sequence
  intestinotrophic analog of GLP-2
  VARIANT (1)...(1): Xaa = Arg, Lys or His, with an amino terminal group or an amino terminal blocking group
  VARIANT (2)...(2): Xaa = His or Tyr
  VARIANT (3)...(3): Xaa = is Ala, Gly, D-Ala, Pro, Ile, Nva (Norvaline), alpha -aminobutyric acid, or an Ala-replacement amino acid conferring on said analog resistance to DPP-IV enzyme
  VARIANT (4)...(4): Xaa = Asp, Glu, Pro or Hpro (hydroxyproline); or Xaa-Xaa in positions 3 and 4 taken together are Xaa(psi)(CH(OH)CH2)Xaa; Xaa(psi)(CH2NH2)Xaa or Xaa(psi)(CHCH)Xaa
  VARIANT (5)...(5): Xaa = Gly or Ala
  VARIANT (6)...(6): Xaa = Ser or Ala
  VARIANT (11)...(11): Xaa = Met, Leu, Ile or an oxidatively stable Met-replacement amino acid
  VARIANT (15)...(15): Xaa = Leu or Lys
  VARIANT (17)...(17): Xaa = Asn, Lys or Ala
  VARIANT (18)...(18): Xaa = Leu or Lys
  VARIANT (20)...(20): Xaa = Ala or Thr
  VARIANT (21)...(21): Xaa = Arg, Lys, His or Ala
  VARIANT (22)...(22): Xaa = Asp or Lys
  VARIANT (25)...(25): Xaa = Asn or Ala
  VARIANT (28)...(28): Xaa = Ile or Leu
  VARIANT (29)...(29): Xaa = Gln or His
  VARIANT (33)...(33): Xaa = Arg, Lys or His with a COOH, CONH2 or a C-terminal blocking group
XXXXXXFSDEXNTIXDXXAXXXFIXWLXXTKIX

SEQ ID NO: 88 - protein, 34 aa, Artificial Sequence
  intestinotrophic analog of GLP-2
  VARIANT (1)...(1): Xaa = Arg, Lys or His, with an amino terminal group or an amino terminal blocking group
  VARIANT (2)...(2): Xaa = His or Tyr
  VARIANT (3)...(3): Xaa = is Ala, Gly, D-Ala, Pro, Ile, Nva (Norvaline), alpha -aminobutyric acid, or an Ala-replacement amino acid conferring on said analog resistance to DPP-IV enzyme
  VARIANT (4)...(4): Xaa = Asp, Glu, Pro or Hpro (hydroxyproline); or Xaa-Xaa in positions 3 and 4 taken together are Xaa(psi)(CH(OH)CH2)Xaa; Xaa(psi)(CH2NH2)Xaa or Xaa(psi)(CHCH)Xaa
  VARIANT (5)...(5): Xaa = Gly or Ala
  VARIANT (6)...(6): Xaa = Ser or Ala
  VARIANT (11)...(11): Xaa = Met, Leu, Ile or an oxidatively stable Met-replacement amino acid
  VARIANT (15)...(15): Xaa = Leu or Lys
  VARIANT (17)...(17): Xaa = Asn, Lys or Ala
  VARIANT (18)...(18): Xaa = Leu or Lys
  VARIANT (20)...(20): Xaa = Ala or Thr
  VARIANT (21)...(21): Xaa = Arg, Lys, His or Ala
  VARIANT (22)...(22): Xaa = Asp or Lys
  VARIANT (25)...(25): Xaa = Asn or Ala
  VARIANT (28)...(28): Xaa = Ile or Leu
  VARIANT (29)...(29): Xaa = Gln or His
  VARIANT (33)...(33): Xaa = Arg, Lys or His
  VARIANT (34)...(34): Xaa = Arg, Lys or His with a COOH, CONH2 or a C-terminal blocking group
XXXXXXFSDEXNTIXDXXAXXXFIXWLXXTKIXX

SEQ ID NO: 89 - protein, 33 aa, Artificial Sequence
  intestinotrophic analog of GLP-2
  VARIANT (1)...(1): Xaa = Arg, Lys or His, with an amino terminal group or an amino terminal blocking group
  VARIANT (2)...(2): Xaa = Arg, Lys or His
  VARIANT (3)...(3): Xaa = His or Tyr
  VARIANT (4)...(4): Xaa = is Ala, Gly, D-Ala, Pro, Ile, Nva (Norvaline), alpha -aminobutyric acid, or an Ala-replacement amino acid conferring on said analog resistance to DPP-IV enzyme
  VARIANT (5)...(5): Xaa = Asp, Glu, Pro or Hpro (hydroxyproline); or Xaa-Xaa in positions 4 and 5 taken together are Xaa(psi)(CH(OH)CH2)Xaa; Xaa(psi)(CH2NH2)Xaa or Xaa(psi)(CHCH)Xaa
  VARIANT (6)...(6): Xaa = Gly or Ala
  VARIANT (7)...(7): Xaa = Ser or Ala
  VARIANT (12)...(12): Xaa = Met, Leu, Ile or an oxidatively stable Met-replacement amino acid
  VARIANT (16)...(16): Xaa = Leu or Lys
  VARIANT (18)...(18): Xaa = Asn, Lys or Ala
  VARIANT (19)...(19): Xaa = Leu or Lys
  VARIANT (21)...(21): Xaa = Ala or Thr
  VARIANT (22)...(22): Xaa = Arg, Lys, His or Ala
  VARIANT (23)...(23): Xaa = Asp or Lys
  VARIANT (26)...(26): Xaa = Asn or Ala
  VARIANT (29)...(29): Xaa = Ile or Leu
  VARIANT (30)...(30): Xaa = Gln or His
XXXXXXXFSDEXNTIXDXXAXXXFIXWLXXTKI

SEQ ID NO: 90 - protein, 34 aa, Artificial Sequence
  intestinotrophic analog of GLP-2
  VARIANT (1)...(1): Xaa = Arg, Lys or His, with an amino terminal group or an amino terminal blocking group
  VARIANT (2)...(2): Xaa = Arg, Lys or His
  VARIANT (3)...(3): Xaa = His or Tyr
  VARIANT (4)...(4): Xaa = is Ala, Gly, D-Ala, Pro, Ile, Nva (Norvaline), alpha -aminobutyric acid, or an Ala-replacement amino acid conferring on said analog resistance to DPP-IV enzyme
  VARIANT (5)...(5): Xaa = Asp, Glu, Pro or Hpro (hydroxyproline); or Xaa-Xaa in positions 4 and 5 taken together are Xaa(psi)(CH(OH)CH2)Xaa; Xaa(psi)(CH2NH2)Xaa or Xaa(psi)(CHCH)Xaa
  VARIANT (6)...(6): Xaa = Gly or Ala
  VARIANT (7)...(7): Xaa = Ser or Ala
  VARIANT (12)...(12): Xaa = Met, Leu, Ile or an oxidatively stable Met-replacement amino acid
  VARIANT (16)...(16): Xaa = Leu or Lys
  VARIANT (18)...(18): Xaa = Asn, Lys or Ala
  VARIANT (19)...(19): Xaa = Leu or Lys
  VARIANT (21)...(21): Xaa = Ala or Thr
  VARIANT (22)...(22): Xaa = Arg, Lys, His or Ala
  VARIANT (23)...(23): Xaa = Asp or Lys
  VARIANT (26)...(26): Xaa = Asn or Ala
  VARIANT (29)...(29): Xaa = Ile or Leu
  VARIANT (30)...(30): Xaa = Gln or His
  VARIANT (34)...(34): Xaa = Arg, Lys or His with a COOH, CONH2 or a C-terminal blocking group
XXXXXXXFSDEXNTIXDXXAXXXFIXWLXXTKIX

SEQ ID NO: 91 - protein, 35 aa, Artificial Sequence
  intestinotrophic analog of GLP-2
  VARIANT (1)...(1): Xaa = Arg, Lys or His, with an amino terminal group or an amino terminal blocking group
  VARIANT (2)...(2): Xaa = Arg, Lys or His
  VARIANT (3)...(3): Xaa = His or Tyr
  VARIANT (4)...(4): Xaa = is Ala, Gly, D-Ala, Pro, Ile, Nva (Norvaline), alpha -aminobutyric acid, or an Ala-replacement amino acid conferring on said analog resistance to DPP-IV enzyme
  VARIANT (5)...(5): Xaa = Asp, Glu, Pro or Hpro (hydroxyproline); or Xaa-Xaa in positions 4 and 5 taken together are Xaa(psi)(CH(OH)CH2)Xaa; Xaa(psi)(CH2NH2)Xaa or Xaa(psi)(CHCH)Xaa
  VARIANT (6)...(6): Xaa = Gly or Ala
  VARIANT (7)...(7): Xaa = Ser or Ala
  VARIANT (12)...(12): Xaa = Met, Leu, Ile or an oxidatively stable Met-replacement amino acid
  VARIANT (16)...(16): Xaa = Leu or Lys
  VARIANT (18)...(18): Xaa = Asn, Lys or Ala
  VARIANT (19)...(19): Xaa = Leu or Lys
  VARIANT (21)...(21): Xaa = Ala or Thr
  VARIANT (22)...(22): Xaa = Arg, Lys, His or Ala
  VARIANT (23)...(23): Xaa = Asp or Lys
  VARIANT (26)...(26): Xaa = Asn or Ala
  VARIANT (29)...(29): Xaa = Ile or Leu
  VARIANT (30)...(30): Xaa = Gln or His
  VARIANT (34)...(34): Xaa = Arg, Lys or His
  VARIANT (35)...(35): Xaa = Arg, Lys or His with a COOH, CONH2 or a C-terminal blocking group
XXXXXXXFSDEXNTIXDXXAXXXFIXWLXXTKIXX

SEQ ID NO: 92 - protein, 31 aa, Artificial Sequence
  intestinotrophic analog of GLP-2
  VARIANT (1)...(1): Xaa = His or Tyr, with an amino terminal group or an amino terminal blocking group
  VARIANT (2)...(2): Xaa = is Ala, Gly, D-Ala, Pro, Ile, Nva (Norvaline), alpha -aminobutyric acid, or an Ala-replacement amino acid conferring on said analog resistance to DPP-IV enzyme
  VARIANT (3)...(3): Xaa = Asp, Glu, Pro or Hpro (hydroxyproline); or Xaa-Xaa in positions 2 and 3 taken together are Xaa(psi)(CH(OH)CH2)Xaa; Xaa(psi)(CH2NH2)Xaa or Xaa(psi)(CHCH)Xaa
  VARIANT (4)...(4): Xaa = Gly or Ala
  VARIANT (5)...(5): Xaa = Ser or Ala
  VARIANT (10)...(10): Xaa = Met, Leu, Ile or an oxidatively stable Met-replacement amino acid
  VARIANT (14)...(14): Xaa = Leu or Lys
  VARIANT (16)...(16): Xaa = Asn, Lys or Ala
  VARIANT (17)...(17): Xaa = Leu or Lys
  VARIANT (19)...(19): Xaa = Ala or Thr
  VARIANT (20)...(20): Xaa = Arg, Lys, His or Ala
  VARIANT (21)...(21): Xaa = Asp or Lys
  VARIANT (27)...(27): Xaa = Ile or Leu
  VARIANT (28)...(28): Xaa = Gln or His
XXXXXFSDEXNTIXDXXAXXXFVQWLXXTKI

SEQ ID NO: 93 - protein, 32 aa, Artificial Sequence
  intestinotrophic analog of GLP-2
  VARIANT (1)...(1): Xaa = His or Tyr, with an amino terminal group or an amino terminal blocking group
  VARIANT (2)...(2): Xaa = is Ala, Gly, D-Ala, Pro, Ile, Nva (Norvaline), alpha -aminobutyric acid, or an Ala-replacement amino acid conferring on said analog resistance to DPP-IV enzyme
  VARIANT (3)...(3): Xaa = Asp, Glu, Pro or Hpro (hydroxyproline); or Xaa-Xaa in positions 2 and 3 taken together are Xaa(psi)(CH(OH)CH2)Xaa; Xaa(psi)(CH2NH2)Xaa or Xaa(psi)(CHCH)Xaa
  VARIANT (4)...(4): Xaa = Gly or Ala
  VARIANT (5)...(5): Xaa = Ser or Ala
  VARIANT (10)...(10): Xaa = Met, Leu, Ile or an oxidatively stable Met-replacement amino acid
  VARIANT (14)...(14): Xaa = Leu or Lys
  VARIANT (16)...(16): Xaa = Asn, Lys or Ala
  VARIANT (17)...(17): Xaa = Leu or Lys
  VARIANT (19)...(19): Xaa = Ala or Thr
  VARIANT (20)...(20): Xaa = Arg, Lys, His or Ala
  VARIANT (21)...(21): Xaa = Asp or Lys
  VARIANT (27)...(27): Xaa = Ile or Leu
  VARIANT (28)...(28): Xaa = Gln or His
  VARIANT (32)...(32): Xaa = Arg, Lys or His with a COOH, CONH2 or a C-terminal blocking group
XXXXXFSDEXNTIXDXXAXXXFVQWLXXTKIX

SEQ ID NO: 94 - protein, 33 aa, Artificial Sequence
  intestinotrophic analog of GLP-2
  VARIANT (1)...(1): Xaa = His or Tyr, with an amino terminal group or an amino terminal blocking group
  VARIANT (2)...(2): Xaa = is Ala, Gly, D-Ala, Pro, Ile, Nva (Norvaline), alpha -aminobutyric acid, or an Ala-replacement amino acid conferring on said analog resistance to DPP-IV enzyme
  VARIANT (3)...(3): Xaa = Asp, Glu, Pro or Hpro (hydroxyproline); or Xaa-Xaa in positions 2 and 3 taken together are Xaa(psi)(CH(OH)CH2)Xaa; Xaa(psi)(CH2NH2)Xaa or Xaa(psi)(CHCH)Xaa
  VARIANT (4)...(4): Xaa = Gly or Ala
  VARIANT (5)...(5): Xaa = Ser or Ala
  VARIANT (10)...(10): Xaa = Met, Leu, Ile or an oxidatively stable Met-replacement amino acid
  VARIANT (14)...(14): Xaa = Leu or Lys
  VARIANT (16)...(16): Xaa = Asn, Lys or Ala
  VARIANT (17)...(17): Xaa = Leu or Lys
  VARIANT (19)...(19): Xaa = Ala or Thr
  VARIANT (20)...(20): Xaa = Arg, Lys, His or Ala
  VARIANT (21)...(21): Xaa = Asp or Lys
  VARIANT (27)...(27): Xaa = Ile or Leu
  VARIANT (28)...(28): Xaa = Gln or His
  VARIANT (32)...(32): Xaa = Arg, Lys or His
  VARIANT (33)...(33): Xaa = Arg, Lys or His with a COOH, CONH2 or a C-terminal blocking group
XXXXXFSDEXNTIXDXXAXXXFVQWLXXTKIXX

SEQ ID NO: 95 - protein, 32 aa, Artificial Sequence
  intestinotrophic analog of GLP-2
  VARIANT (1)...(1): Xaa = Arg, Lys or His, with an amino terminal group or an amino terminal blocking group
  VARIANT (2)...(2): Xaa = His or Tyr
  VARIANT (3)...(3): Xaa = is Ala, Gly, D-Ala, Pro, Ile, Nva (Norvaline), alpha -aminobutyric acid, or an Ala-replacement amino acid conferring on said analog resistance to DPP-IV enzyme
  VARIANT (4)...(4): Xaa = Asp, Glu, Pro or Hpro (hydroxyproline); or Xaa-Xaa in positions 3 and 4 taken together are Xaa(psi)(CH(OH)CH2)Xaa; Xaa(psi)(CH2NH2)Xaa or Xaa(psi)(CHCH)Xaa
  VARIANT (5)...(5): Xaa = Gly or Ala
  VARIANT (6)...(6): Xaa = Ser or Ala
  VARIANT (11)...(11): Xaa = Met, Leu, Ile or an oxidatively stable Met-replacement amino acid
  VARIANT (15)...(15): Xaa = Leu or Lys
  VARIANT (17)...(17): Xaa = Asn, Lys or Ala
  VARIANT (18)...(18): Xaa = Leu or Lys
  VARIANT (20)...(20): Xaa = Ala or Thr
  VARIANT (21)...(21): Xaa = Arg, Lys, His or Ala
  VARIANT (22)...(22): Xaa = Asp or Lys
  VARIANT (28)...(28): Xaa = Ile or Leu
  VARIANT (29)...(29): Xaa = Gln or His
XXXXXXFSDEXNTIXDXXAXXXFVQWLXXTKI

SEQ ID NO: 96 - protein, 33 aa, Artificial Sequence
  intestinotrophic analog of GLP-2
  VARIANT (1)...(1): Xaa = Arg, Lys or His, with an amino terminal group or an amino terminal blocking group
  VARIANT (2)...(2): Xaa = His or Tyr
  VARIANT (3)...(3): Xaa = is Ala, Gly, D-Ala, Pro, Ile, Nva (Norvaline), alpha -aminobutyric acid, or an Ala-replacement amino acid conferring on said analog resistance to DPP-IV enzyme
  VARIANT (4)...(4): Xaa = Asp, Glu, Pro or Hpro (hydroxyproline); or Xaa-Xaa in positions 3 and 4 taken together are Xaa(psi)(CH(OH)CH2)Xaa; Xaa(psi)(CH2NH2)Xaa or Xaa(psi)(CHCH)Xaa
  VARIANT (5)...(5): Xaa = Gly or Ala
  VARIANT (6)...(6): Xaa = Ser or Ala
  VARIANT (11)...(11): Xaa = Met, Leu, Ile or an oxidatively stable Met-replacement amino acid
  VARIANT (15)...(15): Xaa = Leu or Lys
  VARIANT (17)...(17): Xaa = Asn, Lys or Ala
  VARIANT (18)...(18): Xaa = Leu or Lys
  VARIANT (20)...(20): Xaa = Ala or Thr
  VARIANT (21)...(21): Xaa = Arg, Lys, His or Ala
  VARIANT (22)...(22): Xaa = Asp or Lys
  VARIANT (28)...(28): Xaa = Ile or Leu
  VARIANT (29)...(29): Xaa = Gln or His
  VARIANT (33)...(33): Xaa = Arg, Lys or His with a COOH, CONH2 or a C-terminal blocking group
XXXXXXFSDEXNTIXDXXAXXXFVQWLXXTKIX

SEQ ID NO: 97 - protein, 34 aa, Artificial Sequence
  intestinotrophic analog of GLP-2
  VARIANT (1)...(1): Xaa = Arg, Lys or His, with an amino terminal group or an amino terminal blocking group
  VARIANT (2)...(2): Xaa = His or Tyr
  VARIANT (3)...(3): Xaa = is Ala, Gly, D-Ala, Pro, Ile, Nva (Norvaline), alpha -aminobutyric acid, or an Ala-replacement amino acid conferring on said analog resistance to DPP-IV enzyme
  VARIANT (4)...(4): Xaa = Asp, Glu, Pro or Hpro (hydroxyproline); or Xaa-Xaa in positions 3 and 4 taken together are Xaa(psi)(CH(OH)CH2)Xaa; Xaa(psi)(CH2NH2)Xaa or Xaa(psi)(CHCH)Xaa
  VARIANT (5)...(5): Xaa = Gly or Ala
  VARIANT (6)...(6): Xaa = Ser or Ala
  VARIANT (11)...(11): Xaa = Met, Leu, Ile or an oxidatively stable Met-replacement amino acid
  VARIANT (15)...(15): Xaa = Leu or Lys
  VARIANT (17)...(17): Xaa = Asn, Lys or Ala
  VARIANT (18)...(18): Xaa = Leu or Lys
  VARIANT (20)...(20): Xaa = Ala or Thr
  VARIANT (21)...(21): Xaa = Arg, Lys, His or Ala
  VARIANT (22)...(22): Xaa = Asp or Lys
  VARIANT (28)...(28): Xaa = Ile or Leu
  VARIANT (29)...(29): Xaa = Gln or His
  VARIANT (33)...(33): Xaa = Arg, Lys or His
  VARIANT (34)...(34): Xaa = Arg, Lys or His with a COOH, CONH2 or a C-terminal blocking group
XXXXXXFSDEXNTIXDXXAXXXFVQWLXXTKIXX

SEQ ID NO: 98 - protein, 33 aa, Artificial Sequence
  intestinotrophic analog of GLP-2
  VARIANT (1)...(1): Xaa = Arg, Lys or His, with an amino terminal group or an amino terminal blocking group
  VARIANT (2)...(2): Xaa = Arg, Lys or His
  VARIANT (3)...(3): Xaa = His or Tyr
  VARIANT (4)...(4): Xaa = is Ala, Gly, D-Ala, Pro, Ile, Nva (Norvaline), alpha -aminobutyric acid, or an Ala-replacement amino acid conferring on said analog resistance to DPP-IV enzyme
  VARIANT (5)...(5): Xaa = Asp, Glu, Pro or Hpro (hydroxyproline); or Xaa-Xaa in positions 4 and 5 taken together are Xaa(psi)(CH(OH)CH2)Xaa; Xaa(psi)(CH2NH2)Xaa or Xaa(psi)(CHCH)Xaa
  VARIANT (6)...(6): Xaa = Gly or Ala
  VARIANT (7)...(7): Xaa = Ser or Ala
  VARIANT (12)...(12): Xaa = Met, Leu, Ile or an oxidatively stable Met-replacement amino acid
  VARIANT (16)...(16): Xaa = Leu or Lys
  VARIANT (18)...(18): Xaa = Asn, Lys or Ala
  VARIANT (19)...(19): Xaa = Leu or Lys
  VARIANT (21)...(21): Xaa = Ala or Thr
  VARIANT (22)...(22): Xaa = Arg, Lys, His or Ala
  VARIANT (23)...(23): Xaa = Asp or Lys
  VARIANT (29)...(29): Xaa = Ile or Leu
  VARIANT (30)...(30): Xaa = Gln or His
XXXXXXXFSDEXNTIXDXXAXXXFVQWLXXTKI

SEQ ID NO: 99 - protein, 34 aa, Artificial Sequence
  intestinotrophic analog of GLP-2
  VARIANT (1)...(1): Xaa = Arg, Lys or His, with an amino terminal group or an amino terminal blocking group
  VARIANT (2)...(2): Xaa = Arg, Lys or His
  VARIANT (3)...(3): Xaa = His or Tyr
  VARIANT (4)...(4): Xaa = is Ala, Gly, D-Ala, Pro, Ile, Nva (Norvaline), alpha -aminobutyric acid, or an Ala-replacement amino acid conferring on said analog resistance to DPP-IV enzyme
  VARIANT (5)...(5): Xaa = Asp, Glu, Pro or Hpro (hydroxyproline); or Xaa-Xaa in positions 4 and 5 taken together are Xaa(psi)(CH(OH)CH2)Xaa; Xaa(psi)(CH2NH2)Xaa or Xaa(psi)(CHCH)Xaa
  VARIANT (6)...(6): Xaa = Gly or Ala
  VARIANT (7)...(7): Xaa = Ser or Ala
  VARIANT (12)...(12): Xaa = Met, Leu, Ile or an oxidatively stable Met-replacement amino acid
  VARIANT (16)...(16): Xaa = Leu or Lys
  VARIANT (18)...(18): Xaa = Asn, Lys or Ala
  VARIANT (19)...(19): Xaa = Leu or Lys
  VARIANT (21)...(21): Xaa = Ala or Thr
  VARIANT (22)...(22): Xaa = Arg, Lys, His or Ala
  VARIANT (23)...(23): Xaa = Asp or Lys
  VARIANT (29)...(29): Xaa = Ile or Leu
  VARIANT (30)...(30): Xaa = Gln or His
  VARIANT (34)...(34): Xaa = Arg, Lys or His with a COOH, CONH2 or a C-terminal blocking group
XXXXXXXFSDEXNTIXDXXAXXXFVQWLXXTKIX

SEQ ID NO: 100 - protein, 35 aa, Artificial Sequence
  intestinotrophic analog of GLP-2
  VARIANT (1)...(1): Xaa = Arg, Lys or His, with an amino terminal group or an amino terminal blocking group
  VARIANT (2)...(2): Xaa = Arg, Lys or His
  VARIANT (3)...(3): Xaa = His or Tyr
  VARIANT (4)...(4): Xaa = is Ala, Gly, D-Ala, Pro, Ile, Nva (Norvaline), alpha -aminobutyric acid, or an Ala-replacement amino acid conferring on said analog resistance to DPP-IV enzyme
  VARIANT (5)...(5): Xaa = Asp, Glu, Pro or Hpro (hydroxyproline); or Xaa-Xaa in positions 4 and 5 taken together are Xaa(psi)(CH(OH)CH2)Xaa; Xaa(psi)(CH2NH2)Xaa or Xaa(psi)(CHCH)Xaa
  VARIANT (6)...(6): Xaa = Gly or Ala
  VARIANT (7)...(7): Xaa = Ser or Ala
  VARIANT (12)...(12): Xaa = Met, Leu, Ile or an oxidatively stable Met-replacement amino acid
  VARIANT (16)...(16): Xaa = Leu or Lys
  VARIANT (18)...(18): Xaa = Asn, Lys or Ala
  VARIANT (19)...(19): Xaa = Leu or Lys
  VARIANT (21)...(21): Xaa = Ala or Thr
  VARIANT (22)...(22): Xaa = Arg, Lys, His or Ala
  VARIANT (23)...(23): Xaa = Asp or Lys
  VARIANT (29)...(29): Xaa = Ile or Leu
  VARIANT (30)...(30): Xaa = Gln or His
  VARIANT (34)...(34): Xaa = Arg, Lys or His
  VARIANT (35)...(35): Xaa = Arg, Lys or His with a COOH, CONH2 or a C-terminal blocking group
XXXXXXXFSDEXNTIXDXXAXXXFVQWLXXTKIXX

SEQ ID NO: 101 - protein, 31 aa, Artificial Sequence
  intestinotrophic analog of GLP-2
  VARIANT (1)...(1): Xaa = His or Tyr, with an amino terminal group or an amino terminal blocking group
  VARIANT (2)...(2): Xaa = is Ala, Gly, D-Ala, Pro, Ile, Nva (Norvaline), alpha -aminobutyric acid, or an Ala-replacement amino acid conferring on said analog resistance to DPP-IV enzyme
  VARIANT (3)...(3): Xaa = Asp, Glu, Pro or Hpro (hydroxyproline); or Xaa-Xaa in positions 2 and 3 taken together are Xaa(psi)(CH(OH)CH2)Xaa; Xaa(psi)(CH2NH2)Xaa or Xaa(psi)(CHCH)Xaa
  VARIANT (4)...(4): Xaa = Gly or Ala
  VARIANT (5)...(5): Xaa = Ser or Ala
  VARIANT (10)...(10): Xaa = Met, Leu, Ile or an oxidatively stable Met-replacement amino acid
  VARIANT (14)...(14): Xaa = Leu or Lys
  VARIANT (16)...(16): Xaa = Asn, Lys or Ala
  VARIANT (17)...(17): Xaa = Leu or Lys
  VARIANT (19)...(19): Xaa = Ala or Thr
  VARIANT (20)...(20): Xaa = Arg, Lys, His or Ala
  VARIANT (21)...(21): Xaa = Asp or Lys
  VARIANT (24)...(24): Xaa = Asn or Ala
  VARIANT (27)...(27): Xaa = Ile or Leu
  VARIANT (28)...(28): Xaa = Gln or His
XXXXXFSDGXNTVXDXXAXXXFIXWLXXTKI

SEQ ID NO: 102 - protein, 32 aa, Artificial Sequence
  intestinotrophic analog of GLP-2
  VARIANT (1)...(1): Xaa = His or Tyr, with an amino terminal group or an amino terminal blocking group
  VARIANT (2)...(2): Xaa = is Ala, Gly, D-Ala, Pro, Ile, Nva (Norvaline), alpha -aminobutyric acid, or an Ala-replacement amino acid conferring on said analog resistance to DPP-IV enzyme
  VARIANT (3)...(3): Xaa = Asp, Glu, Pro or Hpro (hydroxyproline); or Xaa-Xaa in positions 2 and 3 taken together are Xaa(psi)(CH(OH)CH2)Xaa; Xaa(psi)(CH2NH2)Xaa or Xaa(psi)(CHCH)Xaa
  VARIANT (4)...(4): Xaa = Gly or Ala
  VARIANT (5)...(5): Xaa = Ser or Ala
  VARIANT (10)...(10): Xaa = Met, Leu, Ile or an oxidatively stable Met-replacement amino acid
  VARIANT (14)...(14): Xaa = Leu or Lys
  VARIANT (16)...(16): Xaa = Asn, Lys or Ala
  VARIANT (17)...(17): Xaa = Leu or Lys
  VARIANT (19)...(19): Xaa = Ala or Thr
  VARIANT (20)...(20): Xaa = Arg, Lys, His or Ala
  VARIANT (21)...(21): Xaa = Asp or Lys
  VARIANT (24)...(24): Xaa = Asn or Ala
  VARIANT (27)...(27): Xaa = Ile or Leu
  VARIANT (28)...(28): Xaa = Gln or His
  VARIANT (32)...(32): Xaa = Arg, Lys or His with a COOH, CONH2 or a C-terminal blocking group
XXXXXFSDGXNTVXDXXAXXXFIXWLXXTKIX

SEQ ID NO: 103 - protein, 33 aa, Artificial Sequence
  intestinotrophic analog of GLP-2
  VARIANT (1)...(1): Xaa = His or Tyr, with an amino terminal group or an amino terminal blocking group
  VARIANT (2)...(2): Xaa = is Ala, Gly, D-Ala, Pro, Ile, Nva (Norvaline), alpha -aminobutyric acid, or an Ala-replacement amino acid conferring on said analog resistance to DPP-IV enzyme
  VARIANT (3)...(3): Xaa = Asp, Glu, Pro or Hpro (hydroxyproline); or Xaa-Xaa in positions 2 and 3 taken together are Xaa(psi)(CH(OH)CH2)Xaa; Xaa(psi)(CH2NH2)Xaa or Xaa(psi)(CHCH)Xaa
  VARIANT (4)...(4): Xaa = Gly or Ala
  VARIANT (5)...(5): Xaa = Ser or Ala
  VARIANT (10)...(10): Xaa = Met, Leu, Ile or an oxidatively stable Met-replacement amino acid
  VARIANT (14)...(14): Xaa = Leu or Lys
  VARIANT (16)...(16): Xaa = Asn, Lys or Ala
  VARIANT (17)...(17): Xaa = Leu or Lys
  VARIANT (19)...(19): Xaa = Ala or Thr
  VARIANT (20)...(20): Xaa = Arg, Lys, His or Ala
  VARIANT (21)...(21): Xaa = Asp or Lys
  VARIANT (24)...(24): Xaa = Asn or Ala
  VARIANT (27)...(27): Xaa = Ile or Leu
  VARIANT (28)...(28): Xaa = Gln or His
  VARIANT (32)...(32): Xaa = Arg, Lys or His
  VARIANT (33)...(33): Xaa = Arg, Lys or His with a COOH, CONH2 or a C-terminal blocking group
XXXXXFSDGXNTVXDXXAXXXFIXWLXXTKIXX

SEQ ID NO: 104 - protein, 32 aa, Artificial Sequence
  intestinotrophic analog of GLP-2
  VARIANT (1)...(1): Xaa = Arg, Lys or His, with an amino terminal group or an amino terminal blocking group
  VARIANT (2)...(2): Xaa = His or Tyr
  VARIANT (3)...(3): Xaa = is Ala, Gly, D-Ala, Pro, Ile, Nva (Norvaline), alpha -aminobutyric acid, or an Ala-replacement amino acid conferring on said analog resistance to DPP-IV enzyme
  VARIANT (4)...(4): Xaa = Asp, Glu, Pro or Hpro (hydroxyproline); or Xaa-Xaa in positions 3 and 4 taken together are Xaa(psi)(CH(OH)CH2)Xaa; Xaa(psi)(CH2NH2)Xaa or Xaa(psi)(CHCH)Xaa
  VARIANT (5)...(5): Xaa = Gly or Ala
  VARIANT (6)...(6): Xaa = Ser or Ala
  VARIANT (11)...(11): Xaa = Met, Leu, Ile or an oxidatively stable Met-replacement amino acid
  VARIANT (15)...(15): Xaa = Leu or Lys
  VARIANT (17)...(17): Xaa = Asn, Lys or Ala
  VARIANT (18)...(18): Xaa = Leu or Lys
  VARIANT (20)...(20): Xaa = Ala or Thr
  VARIANT (21)...(21): Xaa = Arg, Lys, His or Ala
  VARIANT (22)...(22): Xaa = Asp or Lys
  VARIANT (25)...(25): Xaa = Asn or Ala
  VARIANT (28)...(28): Xaa = Ile or Leu
  VARIANT (29)...(29): Xaa = Gln or His
XXXXXXFSDGXNTVXDXXAXXXFIXWLXXTKI

SEQ ID NO: 105 - protein, 33 aa, Artificial Sequence
  intestinotrophic analog of GLP-2
  VARIANT (1)...(1): Xaa = Arg, Lys or His, with an amino terminal group or an amino terminal blocking group
  VARIANT (2)...(2): Xaa = His or Tyr
  VARIANT (3)...(3): Xaa = is Ala, Gly, D-Ala, Pro, Ile, Nva (Norvaline), alpha -aminobutyric acid, or an Ala-replacement amino acid conferring on said analog resistance to DPP-IV enzyme
  VARIANT (4)...(4): Xaa = Asp, Glu, Pro or Hpro (hydroxyproline); or Xaa-Xaa in positions 3 and 4 taken together are Xaa(psi)(CH(OH)CH2)Xaa; Xaa(psi)(CH2NH2)Xaa or Xaa(psi)(CHCH)Xaa
  VARIANT (5)...(5): Xaa = Gly or Ala
  VARIANT (6)...(6): Xaa = Ser or Ala
  VARIANT (11)...(11): Xaa = Met, Leu, Ile or an oxidatively stable Met-replacement amino acid
  VARIANT (15)...(15): Xaa = Leu or Lys
  VARIANT (17)...(17): Xaa = Asn, Lys or Ala
  VARIANT (18)...(18): Xaa = Leu or Lys
  VARIANT (20)...(20): Xaa = Ala or Thr
  VARIANT (21)...(21): Xaa = Arg, Lys, His or Ala
  VARIANT (22)...(22): Xaa = Asp or Lys
  VARIANT (25)...(25): Xaa = Asn or Ala
  VARIANT (28)...(28): Xaa = Ile or Leu
  VARIANT (29)...(29): Xaa = Gln or His
  VARIANT (33)...(33): Xaa = Arg, Lys or His with a COOH, CONH2 or a C-terminal blocking group
XXXXXXFSDGXNTVXDXXAXXXFIXWLXXTKIX

SEQ ID NO: 106 - protein, 34 aa, Artificial Sequence
  intestinotrophic analog of GLP-2
  VARIANT (1)...(1): Xaa = Arg, Lys or His, with an amino terminal group or an amino terminal blocking group
  VARIANT (2)...(2): Xaa = His or Tyr
  VARIANT (3)...(3): Xaa = is Ala, Gly, D-Ala, Pro, Ile, Nva (Norvaline), alpha -aminobutyric acid, or an Ala-replacement amino acid conferring on said analog resistance to DPP-IV enzyme
  VARIANT (4)...(4): Xaa = Asp, Glu, Pro or Hpro (hydroxyproline); or Xaa-Xaa in positions 3 and 4 taken together are Xaa(psi)(CH(OH)CH2)Xaa; Xaa(psi)(CH2NH2)Xaa or Xaa(psi)(CHCH)Xaa
  VARIANT (5)...(5): Xaa = Gly or Ala
  VARIANT (6)...(6): Xaa = Ser or Ala
  VARIANT (11)...(11): Xaa = Met, Leu, Ile or an oxidatively stable Met-replacement amino acid
  VARIANT (15)...(15): Xaa = Leu or Lys
  VARIANT (17)...(17): Xaa = Asn, Lys or Ala
  VARIANT (18)...(18): Xaa = Leu or Lys
  VARIANT (20)...(20): Xaa = Ala or Thr
  VARIANT (21)...(21): Xaa = Arg, Lys, His or Ala
  VARIANT (22)...(22): Xaa = Asp or Lys
  VARIANT (25)...(25): Xaa = Asn or Ala
  VARIANT (28)...(28): Xaa = Ile or Leu
  VARIANT (29)...(29): Xaa = Gln or His
  VARIANT (33)...(33): Xaa = Arg, Lys or His
  VARIANT (34)...(34): Xaa = Arg, Lys or His with a COOH, CONH2 or a C-terminal blocking group
XXXXXXFSDGXNTVXDXXAXXXFIXWLXXTKIXX

SEQ ID NO: 107 - protein, 33 aa, Artificial Sequence
  intestinotrophic analog of GLP-2
  VARIANT (1)...(1): Xaa = Arg, Lys or His, with an amino terminal group or an amino terminal blocking group
  VARIANT (2)...(2): Xaa = Arg, Lys or His
  VARIANT (3)...(3): Xaa = His or Tyr
  VARIANT (4)...(4): Xaa = is Ala, Gly, D-Ala, Pro, Ile, Nva (Norvaline), alpha -aminobutyric acid, or an Ala-replacement amino acid conferring on said analog resistance to DPP-IV enzyme
  VARIANT (5)...(5): Xaa = Asp, Glu, Pro or Hpro (hydroxyproline); or Xaa-Xaa in positions 4 and 5 taken together are Xaa(psi)(CH(OH)CH2)Xaa; Xaa(psi)(CH2NH2)Xaa or Xaa(psi)(CHCH)Xaa
  VARIANT (6)...(6): Xaa = Gly or Ala
  VARIANT (7)...(7): Xaa = Ser or Ala
  VARIANT (12)...(12): Xaa = Met, Leu, Ile or an oxidatively stable Met-replacement amino acid
  VARIANT (16)...(16): Xaa = Leu or Lys
  VARIANT (18)...(18): Xaa = Asn, Lys or Ala
  VARIANT (19)...(19): Xaa = Leu or Lys
  VARIANT (21)...(21): Xaa = Ala or Thr
  VARIANT (22)...(22): Xaa = Arg, Lys, His or Ala
  VARIANT (23)...(23): Xaa = Asp or Lys
  VARIANT (26)...(26): Xaa = Asn or Ala
  VARIANT (29)...(29): Xaa = Ile or Leu
  VARIANT (30)...(30): Xaa = Gln or His
XXXXXXXFSDGXNTVXDXXAXXXFIXWLXXTKI

SEQ ID NO: 108 - protein, 34 aa, Artificial Sequence
  intestinotrophic analog of GLP-2
  VARIANT (1)...(1): Xaa = Arg, Lys or His, with an amino terminal group or an amino terminal blocking group
  VARIANT (2)...(2): Xaa = Arg, Lys or His
  VARIANT (3)...(3): Xaa = His or Tyr
  VARIANT (4)...(4): Xaa = is Ala, Gly, D-Ala, Pro, Ile, Nva (Norvaline), alpha -aminobutyric acid, or an Ala-replacement amino acid conferring on said analog resistance to DPP-IV enzyme
  VARIANT (5)...(5): Xaa = Asp, Glu, Pro or Hpro (hydroxyproline); or Xaa-Xaa in positions 4 and 5 taken together are Xaa(psi)(CH(OH)CH2)Xaa; Xaa(psi)(CH2NH2)Xaa or Xaa(psi)(CHCH)Xaa
  VARIANT (6)...(6): Xaa = Gly or Ala
  VARIANT (7)...(7): Xaa = Ser or Ala
  VARIANT (12)...(12): Xaa = Met, Leu, Ile or an oxidatively stable Met-replacement amino acid
  VARIANT (16)...(16): Xaa = Leu or Lys
  VARIANT (18)...(18): Xaa = Asn, Lys or Ala
  VARIANT (19)...(19): Xaa = Leu or Lys
  VARIANT (21)...(21): Xaa = Ala or Thr
  VARIANT (22)...(22): Xaa = Arg, Lys, His or Ala
  VARIANT (23)...(23): Xaa = Asp or Lys
  VARIANT (26)...(26): Xaa = Asn or Ala
  VARIANT (29)...(29): Xaa = Ile or Leu
  VARIANT (30)...(30): Xaa = Gln or His
  VARIANT (34)...(34): Xaa = Arg, Lys or His with a COOH, CONH2 or a C-terminal blocking group
XXXXXXXFSDGXNTVXDXXAXXXFIXWLXXTKIX

SEQ ID NO: 109 - protein, 35 aa, Artificial Sequence
  intestinotrophic analog of GLP-2
  VARIANT (1)...(1): Xaa = Arg, Lys or His, with an amino terminal group or an amino terminal blocking group
  VARIANT (2)...(2): Xaa = Arg, Lys or His
  VARIANT (3)...(3): Xaa = His or Tyr
  VARIANT (4)...(4): Xaa = is Ala, Gly, D-Ala, Pro, Ile, Nva (Norvaline), alpha -aminobutyric acid, or an Ala-replacement amino acid conferring on said analog resistance to DPP-IV enzyme
  VARIANT (5)...(5): Xaa = Asp, Glu, Pro or Hpro (hydroxyproline); or Xaa-Xaa in positions 4 and 5 taken together are Xaa(psi)(CH(OH)CH2)Xaa; Xaa(psi)(CH2NH2)Xaa or Xaa(psi)(CHCH)Xaa
  VARIANT (6)...(6): Xaa = Gly or Ala
  VARIANT (7)...(7): Xaa = Ser or Ala
  VARIANT (12)...(12): Xaa = Met, Leu, Ile or an oxidatively stable Met-replacement amino acid
  VARIANT (16)...(16): Xaa = Leu or Lys
  VARIANT (18)...(18): Xaa = Asn, Lys or Ala
  VARIANT (19)...(19): Xaa = Leu or Lys
  VARIANT (21)...(21): Xaa = Ala or Thr
  VARIANT (22)...(22): Xaa = Arg, Lys, His or Ala
  VARIANT (23)...(23): Xaa = Asp or Lys
  VARIANT (26)...(26): Xaa = Asn or Ala
  VARIANT (29)...(29): Xaa = Ile or Leu
  VARIANT (30)...(30): Xaa = Gln or His
  VARIANT (34)...(34): Xaa = Arg, Lys or His
  VARIANT (35)...(35): Xaa = Arg, Lys or His with a COOH, CONH2 or a C-terminal blocking group
XXXXXXXFSDGXNTVXDXXAXXXFIXWLXXTKIXX

SEQ ID NO: 110 - protein, 31 aa, Artificial Sequence
  intestinotrophic analog of GLP-2
  VARIANT (1)...(1): Xaa = His or Tyr, with an amino terminal group or an amino terminal blocking group
  VARIANT (2)...(2): Xaa = is Ala, Gly, D-Ala, Pro, Ile, Nva (Norvaline), alpha -aminobutyric acid, or an Ala-replacement amino acid conferring on said analog resistance to DPP-IV enzyme
  VARIANT (3)...(3): Xaa = Asp, Glu, Pro or Hpro (hydroxyproline); or Xaa-Xaa in positions 2 and 3 taken together are Xaa(psi)(CH(OH)CH2)Xaa; Xaa(psi)(CH2NH2)Xaa or Xaa(psi)(CHCH)Xaa
  VARIANT (4)...(4): Xaa = Gly or Ala
  VARIANT (5)...(5): Xaa = Ser or Ala
  VARIANT (10)...(10): Xaa = Met, Leu, Ile or an oxidatively stable Met-replacement amino acid
  VARIANT (14)...(14): Xaa = Leu or Lys
  VARIANT (16)...(16): Xaa = Asn, Lys or Ala
  VARIANT (17)...(17): Xaa = Leu or Lys
  VARIANT (19)...(19): Xaa = Ala or Thr
  VARIANT (20)...(20): Xaa = Arg, Lys, His or Ala
  VARIANT (21)...(21): Xaa = Asp or Lys
  VARIANT (27)...(27): Xaa = Ile or Leu
  VARIANT (28)...(28): Xaa = Gln or His
XXXXXFSDGXNTVXDXXAXXXFVQWLXXTKI

SEQ ID NO: 111 - protein, 32 aa, Artificial Sequence
  intestinotrophic analog of GLP-2
  VARIANT (1)...(1): Xaa = His or Tyr, with an amino terminal group or an amino terminal blocking group
  VARIANT (2)...(2): Xaa = is Ala, Gly, D-Ala, Pro, Ile, Nva (Norvaline), alpha -aminobutyric acid, or an Ala-replacement amino acid conferring on said analog resistance to DPP-IV enzyme
  VARIANT (3)...(3): Xaa = Asp, Glu, Pro or Hpro (hydroxyproline); or Xaa-Xaa in positions 2 and 3 taken together are Xaa(psi)(CH(OH)CH2)Xaa; Xaa(psi)(CH2NH2)Xaa or Xaa(psi)(CHCH)Xaa
  VARIANT (4)...(4): Xaa = Gly or Ala
  VARIANT (5)...(5): Xaa = Ser or Ala
  VARIANT (10)...(10): Xaa = Met, Leu, Ile or an oxidatively stable Met-replacement amino acid
  VARIANT (14)...(14): Xaa = Leu or Lys
  VARIANT (16)...(16): Xaa = Asn, Lys or Ala
  VARIANT (17)...(17): Xaa = Leu or Lys
  VARIANT (19)...(19): Xaa = Ala or Thr
  VARIANT (20)...(20): Xaa = Arg, Lys, His or Ala
  VARIANT (21)...(21): Xaa = Asp or Lys
  VARIANT (27)...(27): Xaa = Ile or Leu
  VARIANT (28)...(28): Xaa = Gln or His
  VARIANT (32)...(32): Xaa = Arg, Lys or His with a COOH, CONH2 or a C-terminal blocking group
XXXXXFSDGXNTVXDXXAXXXFVQWLXXTKIX

SEQ ID NO: 112 - protein, 33 aa, Artificial Sequence
  intestinotrophic analog of GLP-2
  VARIANT (1)...(1): Xaa = His or Tyr, with an amino terminal group or an amino terminal blocking group
  VARIANT (2)...(2): Xaa = is Ala, Gly, D-Ala, Pro, Ile, Nva (Norvaline), alpha -aminobutyric acid, or an Ala-replacement amino acid conferring on said analog resistance to DPP-IV enzyme
  VARIANT (3)...(3): Xaa = Asp, Glu, Pro or Hpro (hydroxyproline); or Xaa-Xaa in positions 2 and 3 taken together are Xaa(psi)(CH(OH)CH2)Xaa; Xaa(psi)(CH2NH2)Xaa or Xaa(psi)(CHCH)Xaa
  VARIANT (4)...(4): Xaa = Gly or Ala
  VARIANT (5)...(5): Xaa = Ser or Ala
  VARIANT (10)...(10): Xaa = Met, Leu, Ile or an oxidatively stable Met-replacement amino acid
  VARIANT (14)...(14): Xaa = Leu or Lys
  VARIANT (16)...(16): Xaa = Asn, Lys or Ala
  VARIANT (17)...(17): Xaa = Leu or Lys
  VARIANT (19)...(19): Xaa = Ala or Thr
  VARIANT (20)...(20): Xaa = Arg, Lys, His or Ala
  VARIANT (21)...(21): Xaa = Asp or Lys
  VARIANT (27)...(27): Xaa = Ile or Leu
  VARIANT (28)...(28): Xaa = Gln or His
  VARIANT (32)...(32): Xaa = Arg, Lys or His
  VARIANT (33)...(33): Xaa = Arg, Lys or His with a COOH, CONH2 or a C-terminal blocking group
XXXXXFSDGXNTVXDXXAXXXFVQWLXXTKIXX

SEQ ID NO: 113 - protein, 32 aa, Artificial Sequence
  intestinotrophic analog of GLP-2
  VARIANT (1)...(1): Xaa = Arg, Lys or His, with an amino terminal group or an amino terminal blocking group
  VARIANT (2)...(2): Xaa = His or Tyr
  VARIANT (3)...(3): Xaa = is Ala, Gly, D-Ala, Pro, Ile, Nva (Norvaline), alpha -aminobutyric acid, or an Ala-replacement amino acid conferring on said analog resistance to DPP-IV enzyme
  VARIANT (4)...(4): Xaa = Asp, Glu, Pro or Hpro (hydroxyproline); or Xaa-Xaa in positions 3 and 4 taken together are Xaa(psi)(CH(OH)CH2)Xaa; Xaa(psi)(CH2NH2)Xaa or Xaa(psi)(CHCH)Xaa
  VARIANT (5)...(5): Xaa = Gly or Ala
  VARIANT (6)...(6): Xaa = Ser or Ala
  VARIANT (11)...(11): Xaa = Met, Leu, Ile or an oxidatively stable Met-replacement amino acid
  VARIANT (15)...(15): Xaa = Leu or Lys
  VARIANT (17)...(17): Xaa = Asn, Lys or Ala
  VARIANT (18)...(18): Xaa = Leu or Lys
  VARIANT (20)...(20): Xaa = Ala or Thr
  VARIANT (21)...(21): Xaa = Arg, Lys, His or Ala
  VARIANT (22)...(22): Xaa = Asp or Lys
  VARIANT (28)...(28): Xaa = Ile or Leu
  VARIANT (29)...(29): Xaa = Gln or His
XXXXXXFSDGXNTVXDXXAXXXFVQWLXXTKI

SEQ ID NO: 114 - protein, 33 aa, Artificial Sequence
  intestinotrophic analog of GLP-2
  VARIANT (1)...(1): Xaa = Arg, Lys or His, with an amino terminal group or an amino terminal blocking group
  VARIANT (2)...(2): Xaa = His or Tyr
  VARIANT (3)...(3): Xaa = is Ala, Gly, D-Ala, Pro, Ile, Nva (Norvaline), alpha -aminobutyric acid, or an Ala-replacement amino acid conferring on said analog resistance to DPP-IV enzyme
  VARIANT (4)...(4): Xaa = Asp, Glu, Pro or Hpro (hydroxyproline); or Xaa-Xaa in positions 3 and 4 taken together are Xaa(psi)(CH(OH)CH2)Xaa; Xaa(psi)(CH2NH2)Xaa or Xaa(psi)(CHCH)Xaa
  VARIANT (5)...(5): Xaa = Gly or Ala
  VARIANT (6)...(6): Xaa = Ser or Ala
  VARIANT (11)...(11): Xaa = Met, Leu, Ile or an oxidatively stable Met-replacement amino acid
  VARIANT (15)...(15): Xaa = Leu or Lys
  VARIANT (17)...(17): Xaa = Asn, Lys or Ala
  VARIANT (18)...(18): Xaa = Leu or Lys
  VARIANT (20)...(20): Xaa = Ala or Thr
  VARIANT (21)...(21): Xaa = Arg, Lys, His or Ala
  VARIANT (22)...(22): Xaa = Asp or Lys
  VARIANT (28)...(28): Xaa = Ile or Leu
  VARIANT (29)...(29): Xaa = Gln or His
  VARIANT (33)...(33): Xaa = Arg, Lys or His with a COOH, CONH2 or a C-terminal blocking group
XXXXXXFSDGXNTVXDXXAXXXFVQWLXXTKIX

SEQ ID NO: 115 - protein, 34 aa, Artificial Sequence
  intestinotrophic analog of GLP-2
  VARIANT (1)...(1): Xaa = Arg, Lys or His, with an amino terminal group or an amino terminal blocking group
  VARIANT (2)...(2): Xaa = His or Tyr
  VARIANT (3)...(3): Xaa = is Ala, Gly, D-Ala, Pro, Ile, Nva (Norvaline), alpha -aminobutyric acid, or an Ala-replacement amino acid conferring on said analog resistance to DPP-IV enzyme
  VARIANT (4)...(4): Xaa = Asp, Glu, Pro or Hpro (hydroxyproline); or Xaa-Xaa in positions 3 and 4 taken together are Xaa(psi)(CH(OH)CH2)Xaa; Xaa(psi)(CH2NH2)Xaa or Xaa(psi)(CHCH)Xaa
  VARIANT (5)...(5): Xaa = Gly or Ala
  VARIANT (6)...(6): Xaa = Ser or Ala
  VARIANT (11)...(11): Xaa = Met, Leu, Ile or an oxidatively stable Met-replacement amino acid
  VARIANT (15)...(15): Xaa = Leu or Lys
  VARIANT (17)...(17): Xaa = Asn, Lys or Ala
  VARIANT (18)...(18): Xaa = Leu or Lys
  VARIANT (20)...(20): Xaa = Ala or Thr
  VARIANT (21)...(21): Xaa = Arg, Lys, His or Ala
  VARIANT (22)...(22): Xaa = Asp or Lys
  VARIANT (28)...(28): Xaa = Ile or Leu
  VARIANT (29)...(29): Xaa = Gln or His
  VARIANT (33)...(33): Xaa = Arg, Lys or His
  VARIANT (34)...(34): Xaa = Arg, Lys or His with a COOH, CONH2 or a C-terminal blocking group
XXXXXXFSDGXNTVXDXXAXXXFVQWLXXTKIXX

SEQ ID NO: 116 - protein, 33 aa, Artificial Sequence
  intestinotrophic analog of GLP-2
  VARIANT (1)...(1): Xaa = Arg, Lys or His, with an amino terminal group or an amino terminal blocking group
  VARIANT (2)...(2): Xaa = Arg, Lys or His
  VARIANT (3)...(3): Xaa = His or Tyr
  VARIANT (4)...(4): Xaa = is Ala, Gly, D-Ala, Pro, Ile, Nva (Norvaline), alpha -aminobutyric acid, or an Ala-replacement amino acid conferring on said analog resistance to DPP-IV enzyme
  VARIANT (5)...(5): Xaa = Asp, Glu, Pro or Hpro (hydroxyproline); or Xaa-Xaa in positions 4 and 5 taken together are Xaa(psi)(CH(OH)CH2)Xaa; Xaa(psi)(CH2NH2)Xaa or Xaa(psi)(CHCH)Xaa
  VARIANT (6)...(6): Xaa = Gly or Ala
  VARIANT (7)...(7): Xaa = Ser or Ala
  VARIANT (12)...(12): Xaa = Met, Leu, Ile or an oxidatively stable Met-replacement amino acid
  VARIANT (16)...(16): Xaa = Leu or Lys
  VARIANT (18)...(18): Xaa = Asn, Lys or Ala
  VARIANT (19)...(19): Xaa = Leu or Lys
  VARIANT (21)...(21): Xaa = Ala or Thr
  VARIANT (22)...(22): Xaa = Arg, Lys, His or Ala
  VARIANT (23)...(23): Xaa = Asp or Lys
  VARIANT (29)...(29): Xaa = Ile or Leu
  VARIANT (30)...(30): Xaa = Gln or His
XXXXXXXFSDGXNTVXDXXAXXXFVQWLXXTKI

SEQ ID NO: 117 - protein, 34 aa, Artificial Sequence
  intestinotrophic analog of GLP-2
  VARIANT (1)...(1): Xaa = Arg, Lys or His, with an amino terminal group or an amino terminal blocking group
  VARIANT (2)...(2): Xaa = Arg, Lys or His
  VARIANT (3)...(3): Xaa = His or Tyr
  VARIANT (4)...(4): Xaa = is Ala, Gly, D-Ala, Pro, Ile, Nva (Norvaline), alpha -aminobutyric acid, or an Ala-replacement amino acid conferring on said analog resistance to DPP-IV enzyme
  VARIANT (5)...(5): Xaa = Asp, Glu, Pro or Hpro (hydroxyproline); or Xaa-Xaa in positions 4 and 5 taken together are Xaa(psi)(CH(OH)CH2)Xaa; Xaa(psi)(CH2NH2)Xaa or Xaa(psi)(CHCH)Xaa
  VARIANT (6)...(6): Xaa = Gly or Ala
  VARIANT (7)...(7): Xaa = Ser or Ala
  VARIANT (12)...(12): Xaa = Met, Leu, Ile or an oxidatively stable Met-replacement amino acid
  VARIANT (16)...(16): Xaa = Leu or Lys
  VARIANT (18)...(18): Xaa = Asn, Lys or Ala
  VARIANT (19)...(19): Xaa = Leu or Lys
  VARIANT (21)...(21): Xaa = Ala or Thr
  VARIANT (22)...(22): Xaa = Arg, Lys, His or Ala
  VARIANT (23)...(23): Xaa = Asp or Lys
  VARIANT (29)...(29): Xaa = Ile or Leu
  VARIANT (30)...(30): Xaa = Gln or His
  VARIANT (34)...(34): Xaa = Arg, Lys or His with a COOH, CONH2 or a C-terminal blocking group
XXXXXXXFSDGXNTVXDXXAXXXFVQWLXXTKIX

SEQ ID NO: 118 - protein, 35 aa, Artificial Sequence
  intestinotrophic analog of GLP-2
  VARIANT (1)...(1): Xaa = Arg, Lys or His, with an amino terminal group or an amino terminal blocking group
  VARIANT (2)...(2): Xaa = Arg, Lys or His
  VARIANT (3)...(3): Xaa = His or Tyr
  VARIANT (4)...(4): Xaa = is Ala, Gly, D-Ala, Pro, Ile, Nva (Norvaline), alpha -aminobutyric acid, or an Ala-replacement amino acid conferring on said analog resistance to DPP-IV enzyme
  VARIANT (5)...(5): Xaa = Asp, Glu, Pro or Hpro (hydroxyproline); or Xaa-Xaa in positions 4 and 5 taken together are Xaa(psi)(CH(OH)CH2)Xaa; Xaa(psi)(CH2NH2)Xaa or Xaa(psi)(CHCH)Xaa
  VARIANT (6)...(6): Xaa = Gly or Ala
  VARIANT (7)...(7): Xaa = Ser or Ala
  VARIANT (12)...(12): Xaa = Met, Leu, Ile or an oxidatively stable Met-replacement amino acid
  VARIANT (16)...(16): Xaa = Leu or Lys
  VARIANT (18)...(18): Xaa = Asn, Lys or Ala
  VARIANT (19)...(19): Xaa = Leu or Lys
  VARIANT (21)...(21): Xaa = Ala or Thr
  VARIANT (22)...(22): Xaa = Arg, Lys, His or Ala
  VARIANT (23)...(23): Xaa = Asp or Lys
  VARIANT (29)...(29): Xaa = Ile or Leu
  VARIANT (30)...(30): Xaa = Gln or His
  VARIANT (34)...(34): Xaa = Arg, Lys or His
  VARIANT (35)...(35): Xaa = Arg, Lys or His with a COOH, CONH2 or a C-terminal blocking group
XXXXXXXFSDGXNTVXDXXAXXXFVQWLXXTKIXX

SEQ ID NO: 119 - protein, 30 aa, Artificial Sequence
  intestinotrophic analog of GLP-2
  VARIANT (1)...(1): Xaa = His or Tyr, with an amino terminal group or an amino terminal blocking group
  VARIANT (2)...(2): Xaa = is Ala, Gly, D-Ala, Pro, Ile, Nva (Norvaline), alpha -aminobutyric acid, or an Ala-replacement amino acid conferring on said analog resistance to DPP-IV enzyme
  VARIANT (3)...(3): Xaa = Asp, Glu, Pro or Hpro (hydroxyproline); or Xaa-Xaa in positions 2 and 3 taken together are Xaa(psi)(CH(OH)CH2)Xaa; Xaa(psi)(CH2NH2)Xaa or Xaa(psi)(CHCH)Xaa
  VARIANT (4)...(4): Xaa = Gly or Ala
  VARIANT (5)...(5): Xaa = Ser or Ala
  VARIANT (13)...(13): Xaa = Leu or Lys
  VARIANT (15)...(15): Xaa = Asn, Lys or Ala
  VARIANT (16)...(16): Xaa = Leu or Lys
  VARIANT (18)...(18): Xaa = Ala or Thr
  VARIANT (19)...(19): Xaa = Arg, Lys, His or Ala
  VARIANT (20)...(20): Xaa = Asp or Lys
  VARIANT (23)...(23): Xaa = Asn or Ala
  VARIANT (26)...(26): Xaa = Ile or Leu
  VARIANT (27)...(27): Xaa = Gln or His
XXXXXFSDYSKYXDXXAXXXFIXWLXXTKI

SEQ ID NO: 120 - protein, 31 aa, Artificial Sequence
  intestinotrophic analog of GLP-2
  VARIANT (1)...(1): Xaa = His or Tyr, with an amino terminal group or an amino terminal blocking group
  VARIANT (2)...(2): Xaa = is Ala, Gly, D-Ala, Pro, Ile, Nva (Norvaline), alpha -aminobutyric acid, or an Ala-replacement amino acid conferring on said analog resistance to DPP-IV enzyme
  VARIANT (3)...(3): Xaa = Asp, Glu, Pro or Hpro (hydroxyproline); or Xaa-Xaa in positions 2 and 3 taken together are Xaa(psi)(CH(OH)CH2)Xaa; Xaa(psi)(CH2NH2)Xaa or Xaa(psi)(CHCH)Xaa
  VARIANT (4)...(4): Xaa = Gly or Ala
  VARIANT (5)...(5): Xaa = Ser or Ala
  VARIANT (13)...(13): Xaa = Leu or Lys
  VARIANT (15)...(15): Xaa = Asn, Lys or Ala
  VARIANT (16)...(16): Xaa = Leu or Lys
  VARIANT (18)...(18): Xaa = Ala or Thr
  VARIANT (19)...(19): Xaa = Arg, Lys, His or Ala
  VARIANT (20)...(20): Xaa = Asp or Lys
  VARIANT (23)...(23): Xaa = Asn or Ala
  VARIANT (26)...(26): Xaa = Ile or Leu
  VARIANT (27)...(27): Xaa = Gln or His
  VARIANT (31)...(31): Xaa = Arg, Lys or His with a COOH, CONH2 or a C-terminal blocking group
XXXXXFSDYSKYXDXXAXXXFIXWLXXTKIX

SEQ ID NO: 121 - protein, 32 aa, Artificial Sequence
  intestinotrophic analog of GLP-2
  VARIANT (1)...(1): Xaa = His or Tyr, with an amino terminal group or an amino terminal blocking group
  VARIANT (2)...(2): Xaa = is Ala, Gly, D-Ala, Pro, Ile, Nva (Norvaline), alpha -aminobutyric acid, or an Ala-replacement amino acid conferring on said analog resistance to DPP-IV enzyme
  VARIANT (3)...(3): Xaa = Asp, Glu, Pro or Hpro (hydroxyproline); or Xaa-Xaa in positions 2 and 3 taken together are Xaa(psi)(CH(OH)CH2)Xaa; Xaa(psi)(CH2NH2)Xaa or Xaa(psi)(CHCH)Xaa
  VARIANT (4)...(4): Xaa = Gly or Ala
  VARIANT (5)...(5): Xaa = Ser or Ala
  VARIANT (13)...(13): Xaa = Leu or Lys
  VARIANT (15)...(15): Xaa = Asn, Lys or Ala
  VARIANT (16)...(16): Xaa = Leu or Lys
  VARIANT (18)...(18): Xaa = Ala or Thr
  VARIANT (19)...(19): Xaa = Arg, Lys, His or Ala
  VARIANT (20)...(20): Xaa = Asp or Lys
  VARIANT (23)...(23): Xaa = Asn or Ala
  VARIANT (26)...(26): Xaa = Ile or Leu
  VARIANT (27)...(27): Xaa = Gln or His
  VARIANT (31)...(31): Xaa = Arg, Lys or His
  VARIANT (32)...(32): Xaa = Arg, Lys or His with a COOH, CONH2 or a C-terminal blocking group
XXXXXFSDYSKYXDXXAXXXFIXWLXXTKIXX

SEQ ID NO: 122 - protein, 31 aa, Artificial Sequence
  intestinotrophic analog of GLP-2
  VARIANT (1)...(1): Xaa = Arg, Lys or His, with an amino terminal group or an amino terminal blocking group
  VARIANT (2)...(2): Xaa = His or Tyr
  VARIANT (3)...(3): Xaa = is Ala, Gly, D-Ala, Pro, Ile, Nva (Norvaline), alpha -aminobutyric acid, or an Ala-replacement amino acid conferring on said analog resistance to DPP-IV enzyme
  VARIANT (4)...(4): Xaa = Asp, Glu, Pro or Hpro (hydroxyproline); or Xaa-Xaa in positions 3 and 4 taken together are Xaa(psi)(CH(OH)CH2)Xaa; Xaa(psi)(CH2NH2)Xaa or Xaa(psi)(CHCH)Xaa
  VARIANT (5)...(5): Xaa = Gly or Ala
  VARIANT (6)...(6): Xaa = Ser or Ala
  VARIANT (14)...(14): Xaa = Leu or Lys
  VARIANT (16)...(16): Xaa = Asn, Lys or Ala
  VARIANT (17)...(17): Xaa = Leu or Lys
  VARIANT (19)...(19): Xaa = Ala or Thr
  VARIANT (20)...(20): Xaa = Arg, Lys, His or Ala
  VARIANT (21)...(21): Xaa = Asp or Lys
  VARIANT (24)...(24): Xaa = Asn or Ala
  VARIANT (27)...(27): Xaa = Ile or Leu
  VARIANT (28)...(28): Xaa = Gln or His
XXXXXXFSDYSKYXDXXAXXXFIXWLXXTKI

SEQ ID NO: 123 - protein, 32 aa, Artificial Sequence
  intestinotrophic analog of GLP-2
  VARIANT (1)...(1): Xaa = Arg, Lys or His, with an amino terminal group or an amino terminal blocking group
  VARIANT (2)...(2): Xaa = His or Tyr
  VARIANT (3)...(3): Xaa = is Ala, Gly, D-Ala, Pro, Ile, Nva (Norvaline), alpha -aminobutyric acid, or an Ala-replacement amino acid conferring on said analog resistance to DPP-IV enzyme
  VARIANT (4)...(4): Xaa = Asp, Glu, Pro or Hpro (hydroxyproline); or Xaa-Xaa in positions 3 and 4 taken together are Xaa(psi)(CH(OH)CH2)Xaa; Xaa(psi)(CH2NH2)Xaa or Xaa(psi)(CHCH)Xaa
  VARIANT (5)...(5): Xaa = Gly or Ala
  VARIANT (6)...(6): Xaa = Ser or Ala
  VARIANT (14)...(14): Xaa = Leu or Lys
  VARIANT (16)...(16): Xaa = Asn, Lys or Ala
  VARIANT (17)...(17): Xaa = Leu or Lys
  VARIANT (19)...(19): Xaa = Ala or Thr
  VARIANT (20)...(20): Xaa = Arg, Lys, His or Ala
  VARIANT (21)...(21): Xaa = Asp or Lys
  VARIANT (24)...(24): Xaa = Asn or Ala
  VARIANT (27)...(27): Xaa = Ile or Leu
  VARIANT (28)...(28): Xaa = Gln or His
  VARIANT (32)...(32): Xaa = Arg, Lys or His with a COOH, CONH2 or a C-terminal blocking group
XXXXXXFSDYSKYXDXXAXXXFIXWLXXTKIX

SEQ ID NO: 124 - protein, 33 aa, Artificial Sequence
  intestinotrophic analog of GLP-2
  VARIANT (1)...(1): Xaa = Arg, Lys or His, with an amino terminal group or an amino terminal blocking group
  VARIANT (2)...(2): Xaa = His or Tyr
  VARIANT (3)...(3): Xaa = is Ala, Gly, D-Ala, Pro, Ile, Nva (Norvaline), alpha -aminobutyric acid, or an Ala-replacement amino acid conferring on said analog resistance to DPP-IV enzyme
  VARIANT (4)...(4): Xaa = Asp, Glu, Pro or Hpro (hydroxyproline); or Xaa-Xaa in positions 3 and 4 taken together are Xaa(psi)(CH(OH)CH2)Xaa; Xaa(psi)(CH2NH2)Xaa or Xaa(psi)(CHCH)Xaa
  VARIANT (5)...(5): Xaa = Gly or Ala
  VARIANT (6)...(6): Xaa = Ser or Ala
  VARIANT (14)...(14): Xaa = Leu or Lys
  VARIANT (16)...(16): Xaa = Asn, Lys or Ala
  VARIANT (17)...(17): Xaa = Leu or Lys
  VARIANT (19)...(19): Xaa = Ala or Thr
  VARIANT (20)...(20): Xaa = Arg, Lys, His or Ala
  VARIANT (21)...(21): Xaa = Asp or Lys
  VARIANT (24)...(24): Xaa = Asn or Ala
  VARIANT (27)...(27): Xaa = Ile or Leu
  VARIANT (28)...(28): Xaa = Gln or His
  VARIANT (32)...(32): Xaa = Arg, Lys or His
  VARIANT (33)...(33): Xaa = Arg, Lys or His with a COOH, CONH2 or a C-terminal blocking group
XXXXXXFSDYSKYXDXXAXXXFIXWLXXTKIXX

SEQ ID NO: 125 - protein, 32 aa, Artificial Sequence
  intestinotrophic analog of GLP-2
  VARIANT (1)...(1): Xaa = Arg, Lys or His, with an amino terminal group or an amino terminal blocking group
  VARIANT (2)...(2): Xaa = Arg, Lys or His
  VARIANT (3)...(3): Xaa = His or Tyr
  VARIANT (4)...(4): Xaa = is Ala, Gly, D-Ala, Pro, Ile, Nva (Norvaline), alpha -aminobutyric acid, or an Ala-replacement amino acid conferring on said analog resistance to DPP-IV enzyme
  VARIANT (5)...(5): Xaa = Asp, Glu, Pro or Hpro (hydroxyproline); or Xaa-Xaa in positions 4 and 5 taken together are Xaa(psi)(CH(OH)CH2)Xaa; Xaa(psi)(CH2NH2)Xaa or Xaa(psi)(CHCH)Xaa
  VARIANT (6)...(6): Xaa = Gly or Ala
  VARIANT (7)...(7): Xaa = Ser or Ala
  VARIANT (15)...(15): Xaa = Leu or Lys
  VARIANT (17)...(17): Xaa = Asn, Lys or Ala
  VARIANT (18)...(18): Xaa = Leu or Lys
  VARIANT (20)...(20): Xaa = Ala or Thr
  VARIANT (21)...(21): Xaa = Arg, Lys, His or Ala
  VARIANT (22)...(22): Xaa = Asp or Lys
  VARIANT (25)...(25): Xaa = Asn or Ala
  VARIANT (28)...(28): Xaa = Ile or Leu
  VARIANT (29)...(29): Xaa = Gln or His
XXXXXXXFSDYSKYXDXXAXXXFIXWLXXTKI

SEQ ID NO: 126 - protein, 33 aa, Artificial Sequence
  intestinotrophic analog of GLP-2
  VARIANT (1)...(1): Xaa = Arg, Lys or His, with an amino terminal group or an amino terminal blocking group
  VARIANT (2)...(2): Xaa = Arg, Lys or His
  VARIANT (3)...(3): Xaa = His or Tyr
  VARIANT (4)...(4): Xaa = is Ala, Gly, D-Ala, Pro, Ile, Nva (Norvaline), alpha -aminobutyric acid, or an Ala-replacement amino acid conferring on said analog resistance to DPP-IV enzyme
  VARIANT (5)...(5): Xaa = Asp, Glu, Pro or Hpro (hydroxyproline); or Xaa-Xaa in positions 4 and 5 taken together are Xaa(psi)(CH(OH)CH2)Xaa; Xaa(psi)(CH2NH2)Xaa or Xaa(psi)(CHCH)Xaa
  VARIANT (6)...(6): Xaa = Gly or Ala
  VARIANT (7)...(7): Xaa = Ser or Ala
  VARIANT (15)...(15): Xaa = Leu or Lys
  VARIANT (17)...(17): Xaa = Asn, Lys or Ala
  VARIANT (18)...(18): Xaa = Leu or Lys
  VARIANT (20)...(20): Xaa = Ala or Thr
  VARIANT (21)...(21): Xaa = Arg, Lys, His or Ala
  VARIANT (22)...(22): Xaa = Asp or Lys
  VARIANT (25)...(25): Xaa = Asn or Ala
  VARIANT (28)...(28): Xaa = Ile or Leu
  VARIANT (29)...(29): Xaa = Gln or His
  VARIANT (33)...(33): Xaa = Arg, Lys or His with a COOH, CONH2 or a C-terminal blocking group
XXXXXXXFSDYSKYXDXXAXXXFIXWLXXTKIX

SEQ ID NO: 127 - protein, 34 aa, Artificial Sequence
  intestinotrophic analog of GLP-2
  VARIANT (1)...(1): Xaa = Arg, Lys or His, with an amino terminal group or an amino terminal blocking group
  VARIANT (2)...(2): Xaa = Arg, Lys or His
  VARIANT (3)...(3): Xaa = His or Tyr
  VARIANT (4)...(4): Xaa = is Ala, Gly, D-Ala, Pro, Ile, Nva (Norvaline), alpha -aminobutyric acid, or an Ala-replacement amino acid conferring on said analog resistance to DPP-IV enzyme
  VARIANT (5)...(5): Xaa = Asp, Glu, Pro or Hpro (hydroxyproline); or Xaa-Xaa in positions 4 and 5 taken together are Xaa(psi)(CH(OH)CH2)Xaa; Xaa(psi)(CH2NH2)Xaa or Xaa(psi)(CHCH)Xaa
  VARIANT (6)...(6): Xaa = Gly or Ala
  VARIANT (7)...(7): Xaa = Ser or Ala
  VARIANT (15)...(15): Xaa = Leu or Lys
  VARIANT (17)...(17): Xaa = Asn, Lys or Ala
  VARIANT (18)...(18): Xaa = Leu or Lys
  VARIANT (20)...(20): Xaa = Ala or Thr
  VARIANT (21)...(21): Xaa = Arg, Lys, His or Ala
  VARIANT (22)...(22): Xaa = Asp or Lys
  VARIANT (25)...(25): Xaa = Asn or Ala
  VARIANT (28)...(28): Xaa = Ile or Leu
  VARIANT (29)...(29): Xaa = Gln or His
  VARIANT (33)...(33): Xaa = Arg, Lys or His
  VARIANT (34)...(34): Xaa = Arg, Lys or His with a COOH, CONH2 or a C-terminal blocking group
XXXXXXXFSDYSKYXDXXAXXXFIXWLXXTKIXX

SEQ ID NO: 128 - protein, 30 aa, Artificial Sequence
  intestinotrophic analog of GLP-2
  VARIANT (1)...(1): Xaa = His or Tyr, with an amino terminal group or an amino terminal blocking group
  VARIANT (2)...(2): Xaa = is Ala, Gly, D-Ala, Pro, Ile, Nva (Norvaline), alpha -aminobutyric acid, or an Ala-replacement amino acid conferring on said analog resistance to DPP-IV enzyme
  VARIANT (3)...(3): Xaa = Asp, Glu, Pro or Hpro (hydroxyproline); or Xaa-Xaa in positions 2 and 3 taken together are Xaa(psi)(CH(OH)CH2)Xaa; Xaa(psi)(CH2NH2)Xaa or Xaa(psi)(CHCH)Xaa
  VARIANT (4)...(4): Xaa = Gly or Ala
  VARIANT (5)...(5): Xaa = Ser or Ala
  VARIANT (13)...(13): Xaa = Leu or Lys
  VARIANT (15)...(15): Xaa = Asn, Lys or Ala
  VARIANT (16)...(16): Xaa = Leu or Lys
  VARIANT (18)...(18): Xaa = Ala or Thr
  VARIANT (19)...(19): Xaa = Arg, Lys, His or Ala
  VARIANT (20)...(20): Xaa = Asp or Lys
  VARIANT (26)...(26): Xaa = Ile or Leu
  VARIANT (27)...(27): Xaa = Gln or His
XXXXXFSDYSKYXDXXAXXXFVQWLXXTKI

SEQ ID NO: 129 - protein, 31 aa, Artificial Sequence
  intestinotrophic analog of GLP-2
  VARIANT (1)...(1): Xaa = His or Tyr, with an amino terminal group or an amino terminal blocking group
  VARIANT (2)...(2): Xaa = is Ala, Gly, D-Ala, Pro, Ile, Nva (Norvaline), alpha -aminobutyric acid, or an Ala-replacement amino acid conferring on said analog resistance to DPP-IV enzyme
  VARIANT (3)...(3): Xaa = Asp, Glu, Pro or Hpro (hydroxyproline); or Xaa-Xaa in positions 2 and 3 taken together are Xaa(psi)(CH(OH)CH2)Xaa; Xaa(psi)(CH2NH2)Xaa or Xaa(psi)(CHCH)Xaa
  VARIANT (4)...(4): Xaa = Gly or Ala
  VARIANT (5)...(5): Xaa = Ser or Ala
  VARIANT (13)...(13): Xaa = Leu or Lys
  VARIANT (15)...(15): Xaa = Asn, Lys or Ala
  VARIANT (16)...(16): Xaa = Leu or Lys
  VARIANT (18)...(18): Xaa = Ala or Thr
  VARIANT (19)...(19): Xaa = Arg, Lys, His or Ala
  VARIANT (20)...(20): Xaa = Asp or Lys
  VARIANT (26)...(26): Xaa = Ile or Leu
  VARIANT (27)...(27): Xaa = Gln or His
  VARIANT (31)...(31): Xaa = Arg, Lys or His with a COOH, CONH2 or a C-terminal blocking group
XXXXXFSDYSKYXDXXAXXXFVQWLXXTKIX

SEQ ID NO: 130 - protein, 32 aa, Artificial Sequence
  intestinotrophic analog of GLP-2
  VARIANT (1)...(1): Xaa = His or Tyr, with an amino terminal group or an amino terminal blocking group
  VARIANT (2)...(2): Xaa = is Ala, Gly, D-Ala, Pro, Ile, Nva (Norvaline), alpha -aminobutyric acid, or an Ala-replacement amino acid conferring on said analog resistance to DPP-IV enzyme
  VARIANT (3)...(3): Xaa = Asp, Glu, Pro or Hpro (hydroxyproline); or Xaa-Xaa in positions 2 and 3 taken together are Xaa(psi)(CH(OH)CH2)Xaa; Xaa(psi)(CH2NH2)Xaa or Xaa(psi)(CHCH)Xaa
  VARIANT (4)...(4): Xaa = Gly or Ala
  VARIANT (5)...(5): Xaa = Ser or Ala
  VARIANT (13)...(13): Xaa = Leu or Lys
  VARIANT (15)...(15): Xaa = Asn, Lys or Ala
  VARIANT (16)...(16): Xaa = Leu or Lys
  VARIANT (18)...(18): Xaa = Ala or Thr
  VARIANT (19)...(19): Xaa = Arg, Lys, His or Ala
  VARIANT (20)...(20): Xaa = Asp or Lys
  VARIANT (26)...(26): Xaa = Ile or Leu
  VARIANT (27)...(27): Xaa = Gln or His
  VARIANT (31)...(31): Xaa = Arg, Lys or His
  VARIANT (32)...(32): Xaa = Arg, Lys or His with a COOH, CONH2 or a C-terminal blocking group
XXXXXFSDYSKYXDXXAXXXFVQWLXXTKIXX

SEQ ID NO: 131 - protein, 31 aa, Artificial Sequence
  intestinotrophic analog of GLP-2
  VARIANT (1)...(1): Xaa = Arg, Lys or His, with an amino terminal group or an amino terminal blocking group
  VARIANT (2)...(2): Xaa = His or Tyr
  VARIANT (3)...(3): Xaa = is Ala, Gly, D-Ala, Pro, Ile, Nva (Norvaline), alpha -aminobutyric acid, or an Ala-replacement amino acid conferring on said analog resistance to DPP-IV enzyme
  VARIANT (4)...(4): Xaa = Asp, Glu, Pro or Hpro (hydroxyproline); or Xaa-Xaa in positions 3 and 4 taken together are Xaa(psi)(CH(OH)CH2)Xaa; Xaa(psi)(CH2NH2)Xaa or Xaa(psi)(CHCH)Xaa
  VARIANT (5)...(5): Xaa = Gly or Ala
  VARIANT (6)...(6): Xaa = Ser or Ala
  VARIANT (14)...(14): Xaa = Leu or Lys
  VARIANT (16)...(16): Xaa = Asn, Lys or Ala
  VARIANT (17)...(17): Xaa = Leu or Lys
  VARIANT (19)...(19): Xaa = Ala or Thr
  VARIANT (20)...(20): Xaa = Arg, Lys, His or Ala
  VARIANT (21)...(21): Xaa = Asp or Lys
  VARIANT (27)...(27): Xaa = Ile or Leu
  VARIANT (28)...(28): Xaa = Gln or His
XXXXXXFSDYSKYXDXXAXXXFVQWLXXTKI

SEQ ID NO: 132 - protein, 32 aa, Artificial Sequence
  intestinotrophic analog of GLP-2
  VARIANT (1)...(1): Xaa = Arg, Lys or His, with an amino terminal group or an amino terminal blocking group
  VARIANT (2)...(2): Xaa = His or Tyr
  VARIANT (3)...(3): Xaa = is Ala, Gly, D-Ala, Pro, Ile, Nva (Norvaline), alpha -aminobutyric acid, or an Ala-replacement amino acid conferring on said analog resistance to DPP-IV enzyme
  VARIANT (4)...(4): Xaa = Asp, Glu, Pro or Hpro (hydroxyproline); or Xaa-Xaa in positions 3 and 4 taken together are Xaa(psi)(CH(OH)CH2)Xaa; Xaa(psi)(CH2NH2)Xaa or Xaa(psi)(CHCH)Xaa
  VARIANT (5)...(5): Xaa = Gly or Ala
  VARIANT (6)...(6): Xaa = Ser or Ala
  VARIANT (14)...(14): Xaa = Leu or Lys
  VARIANT (16)...(16): Xaa = Asn, Lys or Ala
  VARIANT (17)...(17): Xaa = Leu or Lys
  VARIANT (19)...(19): Xaa = Ala or Thr
  VARIANT (20)...(20): Xaa = Arg, Lys, His or Ala
  VARIANT (21)...(21): Xaa = Asp or Lys
  VARIANT (27)...(27): Xaa = Ile or Leu
  VARIANT (28)...(28): Xaa = Gln or His
  VARIANT (32)...(32): Xaa = Arg, Lys or His with a COOH, CONH2 or a C-terminal blocking group
XXXXXXFSDYSKYXDXXAXXXFVQWLXXTKIX

SEQ ID NO: 133 - protein, 33 aa, Artificial Sequence
  intestinotrophic analog of GLP-2
  VARIANT (1)...(1): Xaa = Arg, Lys or His, with an amino terminal group or an amino terminal blocking group
  VARIANT (2)...(2): Xaa = His or Tyr
  VARIANT (3)...(3): Xaa = is Ala, Gly, D-Ala, Pro, Ile, Nva (Norvaline), alpha -aminobutyric acid, or an Ala-replacement amino acid conferring on said analog resistance to DPP-IV enzyme
  VARIANT (4)...(4): Xaa = Asp, Glu, Pro or Hpro (hydroxyproline); or Xaa-Xaa in positions 3 and 4 taken together are Xaa(psi)(CH(OH)CH2)Xaa; Xaa(psi)(CH2NH2)Xaa or Xaa(psi)(CHCH)Xaa
  VARIANT (5)...(5): Xaa = Gly or Ala
  VARIANT (6)...(6): Xaa = Ser or Ala
  VARIANT (14)...(14): Xaa = Leu or Lys
  VARIANT (16)...(16): Xaa = Asn, Lys or Ala
  VARIANT (17)...(17): Xaa = Leu or Lys
  VARIANT (19)...(19): Xaa = Ala or Thr
  VARIANT (20)...(20): Xaa = Arg, Lys, His or Ala
  VARIANT (21)...(21): Xaa = Asp or Lys
  VARIANT (27)...(27): Xaa = Ile or Leu
  VARIANT (28)...(28): Xaa = Gln or His
  VARIANT (32)...(32): Xaa = Arg, Lys or His
  VARIANT (33)...(33): Xaa = Arg, Lys or His with a COOH, CONH2 or a C-terminal blocking group
XXXXXXFSDYSKYXDXXAXXXFVQWLXXTKIXX

SEQ ID NO: 134 - protein, 32 aa, Artificial Sequence
  intestinotrophic analog of GLP-2
  VARIANT (1)...(1): Xaa = Arg, Lys or His, with an amino terminal group or an amino terminal blocking group
  VARIANT (2)...(2): Xaa = Arg, Lys or His
  VARIANT (3)...(3): Xaa = His or Tyr
  VARIANT (4)...(4): Xaa = is Ala, Gly, D-Ala, Pro, Ile, Nva (Norvaline), alpha -aminobutyric acid, or an Ala-replacement amino acid conferring on said analog resistance to DPP-IV enzyme
  VARIANT (5)...(5): Xaa = Asp, Glu, Pro or Hpro (hydroxyproline); or Xaa-Xaa in positions 4 and 5 taken together are Xaa(psi)(CH(OH)CH2)Xaa; Xaa(psi)(CH2NH2)Xaa or Xaa(psi)(CHCH)Xaa
  VARIANT (6)...(6): Xaa = Gly or Ala
  VARIANT (7)...(7): Xaa = Ser or Ala
  VARIANT (15)...(15): Xaa = Leu or Lys
  VARIANT (17)...(17): Xaa = Asn, Lys or Ala
  VARIANT (18)...(18): Xaa = Leu or Lys
  VARIANT (20)...(20): Xaa = Ala or Thr
  VARIANT (21)...(21): Xaa = Arg, Lys, His or Ala
  VARIANT (22)...(22): Xaa = Asp or Lys
  VARIANT (28)...(28): Xaa = Ile or Leu
  VARIANT (29)...(29): Xaa = Gln or His
XXXXXXXFSDYSKYXDXXAXXXFVQWLXXTKI

SEQ ID NO: 135 - protein, 33 aa, Artificial Sequence
  intestinotrophic analog of GLP-2
  VARIANT (1)...(1): Xaa = Arg, Lys or His, with an amino terminal group or an amino terminal blocking group
  VARIANT (2)...(2): Xaa = Arg, Lys or His
  VARIANT (3)...(3): Xaa = His or Tyr
  VARIANT (4)...(4): Xaa = is Ala, Gly, D-Ala, Pro, Ile, Nva (Norvaline), alpha -aminobutyric acid, or an Ala-replacement amino acid conferring on said analog resistance to DPP-IV enzyme
  VARIANT (5)...(5): Xaa = Asp, Glu, Pro or Hpro (hydroxyproline); or Xaa-Xaa in positions 4 and 5 taken together are Xaa(psi)(CH(OH)CH2)Xaa; Xaa(psi)(CH2NH2)Xaa or Xaa(psi)(CHCH)Xaa
  VARIANT (6)...(6): Xaa = Gly or Ala
  VARIANT (7)...(7): Xaa = Ser or Ala
  VARIANT (15)...(15): Xaa = Leu or Lys
  VARIANT (17)...(17): Xaa = Asn, Lys or Ala
  VARIANT (18)...(18): Xaa = Leu or Lys
  VARIANT (20)...(20): Xaa = Ala or Thr
  VARIANT (21)...(21): Xaa = Arg, Lys, His or Ala
  VARIANT (22)...(22): Xaa = Asp or Lys
  VARIANT (28)...(28): Xaa = Ile or Leu
  VARIANT (29)...(29): Xaa = Gln or His
  VARIANT (33)...(33): Xaa = Arg, Lys or His with a COOH, CONH2 or a C-terminal blocking group
XXXXXXXFSDYSKYXDXXAXXXFVQWLXXTKIX

SEQ ID NO: 136 - protein, 34 aa, Artificial Sequence
  intestinotrophic analog of GLP-2
  VARIANT (1)...(1): Xaa = Arg, Lys or His, with an amino terminal group or an amino terminal blocking group
  VARIANT (2)...(2): Xaa = Arg, Lys or His
  VARIANT (3)...(3): Xaa = His or Tyr
  VARIANT (4)...(4): Xaa = is Ala, Gly, D-Ala, Pro, Ile, Nva (Norvaline), alpha -aminobutyric acid, or an Ala-replacement amino acid conferring on said analog resistance to DPP-IV enzyme
  VARIANT (5)...(5): Xaa = Asp, Glu, Pro or Hpro (hydroxyproline); or Xaa-Xaa in positions 4 and 5 taken together are Xaa(psi)(CH(OH)CH2)Xaa; Xaa(psi)(CH2NH2)Xaa or Xaa(psi)(CHCH)Xaa
  VARIANT (6)...(6): Xaa = Gly or Ala
  VARIANT (7)...(7): Xaa = Ser or Ala
  VARIANT (15)...(15): Xaa = Leu or Lys
  VARIANT (17)...(17): Xaa = Asn, Lys or Ala
  VARIANT (18)...(18): Xaa = Leu or Lys
  VARIANT (20)...(20): Xaa = Ala or Thr
  VARIANT (21)...(21): Xaa = Arg, Lys, His or Ala
  VARIANT (22)...(22): Xaa = Asp or Lys
  VARIANT (28)...(28): Xaa = Ile or Leu
  VARIANT (29)...(29): Xaa = Gln or His
  VARIANT (33)...(33): Xaa = Arg, Lys or His
  VARIANT (34)...(34): Xaa = Arg, Lys or His with a COOH, CONH2 or a C-terminal blocking group
XXXXXXXFSDYSKYXDXXAXXXFVQWLXXTKIXX

SEQ ID NO: 137 - protein, 32 aa, Artificial Sequence
  intestinotrophic analog of GLP-2
  VARIANT (1)...(1): Xaa = His or Tyr, with an amino terminal group or an amino terminal blocking group
  VARIANT (2)...(2): Xaa = is Ala, Gly, D-Ala, Pro, Ile, Nva (Norvaline), alpha -aminobutyric acid, or an Ala-replacement amino acid conferring on said analog resistance to DPP-IV enzyme
  VARIANT (3)...(3): Xaa = Asp, Glu, Pro or Hpro (hydroxyproline); or Xaa-Xaa in positions 2 and 3 taken together are Xaa(psi)(CH(OH)CH2)Xaa; Xaa(psi)(CH2NH2)Xaa or Xaa(psi)(CHCH)Xaa
  VARIANT (4)...(4): Xaa = Gly or Ala
  VARIANT (5)...(5): Xaa = Ser or Ala
  VARIANT (10)...(10): Xaa = Met, Leu, Ile or an oxidatively stable Met-replacement amino acid
  VARIANT (14)...(14): Xaa = Leu or Lys
  VARIANT (16)...(16): Xaa = Asn, Lys or Ala
  VARIANT (17)...(17): Xaa = Leu or Lys
  VARIANT (19)...(19): Xaa = Ala or Thr
  VARIANT (20)...(20): Xaa = Arg, Lys, His or Ala
  VARIANT (21)...(21): Xaa = Asp or Lys
  VARIANT (24)...(24): Xaa = Asn or Ala
  VARIANT (27)...(27): Xaa = Ile or Leu
  VARIANT (28)...(28): Xaa = Gln or His
XXXXXFSDEXNTIXDXXAXXXFIXWLXXTKIT

SEQ ID NO: 138 - protein, 33 aa, Artificial Sequence
  intestinotrophic analog of GLP-2
  VARIANT (1)...(1): Xaa = His or Tyr, with an amino terminal group or an amino terminal blocking group
  VARIANT (2)...(2): Xaa = is Ala, Gly, D-Ala, Pro, Ile, Nva (Norvaline), alpha -aminobutyric acid, or an Ala-replacement amino acid conferring on said analog resistance to DPP-IV enzyme
  VARIANT (3)...(3): Xaa = Asp, Glu, Pro or Hpro (hydroxyproline); or Xaa-Xaa in positions 2 and 3 taken together are Xaa(psi)(CH(OH)CH2)Xaa; Xaa(psi)(CH2NH2)Xaa or Xaa(psi)(CHCH)Xaa
  VARIANT (4)...(4): Xaa = Gly or Ala
  VARIANT (5)...(5): Xaa = Ser or Ala
  VARIANT (10)...(10): Xaa = Met, Leu, Ile or an oxidatively stable Met-replacement amino acid
  VARIANT (14)...(14): Xaa = Leu or Lys
  VARIANT (16)...(16): Xaa = Asn, Lys or Ala
  VARIANT (17)...(17): Xaa = Leu or Lys
  VARIANT (19)...(19): Xaa = Ala or Thr
  VARIANT (20)...(20): Xaa = Arg, Lys, His or Ala
  VARIANT (21)...(21): Xaa = Asp or Lys
  VARIANT (24)...(24): Xaa = Asn or Ala
  VARIANT (27)...(27): Xaa = Ile or Leu
  VARIANT (28)...(28): Xaa = Gln or His
  VARIANT (33)...(33): Xaa = Arg, Lys or His with a COOH, CONH2 or a C-terminal blocking group
XXXXXFSDEXNTIXDXXAXXXFIXWLXXTKITX

SEQ ID NO: 139 - protein, 34 aa, Artificial Sequence
  intestinotrophic analog of GLP-2
  VARIANT (1)...(1): Xaa = His or Tyr, with an amino terminal group or an amino terminal blocking group
  VARIANT (2)...(2): Xaa = is Ala, Gly, D-Ala, Pro, Ile, Nva (Norvaline), alpha -aminobutyric acid, or an Ala-replacement amino acid conferring on said analog resistance to DPP-IV enzyme
  VARIANT (3)...(3): Xaa = Asp, Glu, Pro or Hpro (hydroxyproline); or Xaa-Xaa in positions 2 and 3 taken together are Xaa(psi)(CH(OH)CH2)Xaa; Xaa(psi)(CH2NH2)Xaa or Xaa(psi)(CHCH)Xaa
  VARIANT (4)...(4): Xaa = Gly or Ala
  VARIANT (5)...(5): Xaa = Ser or Ala
  VARIANT (10)...(10): Xaa = Met, Leu, Ile or an oxidatively stable Met-replacement amino acid
  VARIANT (14)...(14): Xaa = Leu or Lys
  VARIANT (16)...(16): Xaa = Asn, Lys or Ala
  VARIANT (17)...(17): Xaa = Leu or Lys
  VARIANT (19)...(19): Xaa = Ala or Thr
  VARIANT (20)...(20): Xaa = Arg, Lys, His or Ala
  VARIANT (21)...(21): Xaa = Asp or Lys
  VARIANT (24)...(24): Xaa = Asn or Ala
  VARIANT (27)...(27): Xaa = Ile or Leu
  VARIANT (28)...(28): Xaa = Gln or His
  VARIANT (33)...(33): Xaa = Arg, Lys or His
  VARIANT (34)...(34): Xaa = Arg, Lys or His with a COOH, CONH2 or a C-terminal blocking group
XXXXXFSDEXNTIXDXXAXXXFIXWLXXTKITXX

SEQ ID NO: 140 - protein, 33 aa, Artificial Sequence
  intestinotrophic analog of GLP-2
  VARIANT (1)...(1): Xaa = Arg, Lys or His, with an amino terminal group or an amino terminal blocking group
  VARIANT (2)...(2): Xaa = His or Tyr
  VARIANT (3)...(3): Xaa = is Ala, Gly, D-Ala, Pro, Ile, Nva (Norvaline), alpha -aminobutyric acid, or an Ala-replacement amino acid conferring on said analog resistance to DPP-IV enzyme
  VARIANT (4)...(4): Xaa = Asp, Glu, Pro or Hpro (hydroxyproline); or Xaa-Xaa in positions 3 and 4 taken together are Xaa(psi)(CH(OH)CH2)Xaa; Xaa(psi)(CH2NH2)Xaa or Xaa(psi)(CHCH)Xaa
  VARIANT (5)...(5): Xaa = Gly or Ala
  VARIANT (6)...(6): Xaa = Ser or Ala
  VARIANT (11)...(11): Xaa = Met, Leu, Ile or an oxidatively stable Met-replacement amino acid
  VARIANT (15)...(15): Xaa = Leu or Lys
  VARIANT (17)...(17): Xaa = Asn, Lys or Ala
  VARIANT (18)...(18): Xaa = Leu or Lys
  VARIANT (20)...(20): Xaa = Ala or Thr
  VARIANT (21)...(21): Xaa = Arg, Lys, His or Ala
  VARIANT (22)...(22): Xaa = Asp or Lys
  VARIANT (25)...(25): Xaa = Asn or Ala
  VARIANT (28)...(28): Xaa = Ile or Leu
  VARIANT (29)...(29): Xaa = Gln or His
XXXXXXFSDEXNTIXDXXAXXXFIXWLXXTKIT

SEQ ID NO: 141 - protein, 34 aa, Artificial Sequence
  intestinotrophic analog of GLP-2
  VARIANT (1)...(1): Xaa = Arg, Lys or His, with an amino terminal group or an amino terminal blocking group
  VARIANT (2)...(2): Xaa = His or Tyr
  VARIANT (3)...(3): Xaa = is Ala, Gly, D-Ala, Pro, Ile, Nva (Norvaline), alpha -aminobutyric acid, or an Ala-replacement amino acid conferring on said analog resistance to DPP-IV enzyme
  VARIANT (4)...(4): Xaa = Asp, Glu, Pro or Hpro (hydroxyproline); or Xaa-Xaa in positions 3 and 4 taken together are Xaa(psi)(CH(OH)CH2)Xaa; Xaa(psi)(CH2NH2)Xaa or Xaa(psi)(CHCH)Xaa
  VARIANT (5)...(5): Xaa = Gly or Ala
  VARIANT (6)...(6): Xaa = Ser or Ala
  VARIANT (11)...(11): Xaa = Met, Leu, Ile or an oxidatively stable Met-replacement amino acid
  VARIANT (15)...(15): Xaa = Leu or Lys
  VARIANT (17)...(17): Xaa = Asn, Lys or Ala
  VARIANT (18)...(18): Xaa = Leu or Lys
  VARIANT (20)...(20): Xaa = Ala or Thr
  VARIANT (21)...(21): Xaa = Arg, Lys, His or Ala
  VARIANT (22)...(22): Xaa = Asp or Lys
  VARIANT (25)...(25): Xaa = Asn or Ala
  VARIANT (28)...(28): Xaa = Ile or Leu
  VARIANT (29)...(29): Xaa = Gln or His
  VARIANT (34)...(34): Xaa = Arg, Lys or His with a COOH, CONH2 or a C-terminal blocking group
XXXXXXFSDEXNTIXDXXAXXXFIXWLXXTKITX

SEQ ID NO: 142 - protein, 35 aa, Artificial Sequence
  intestinotrophic analog of GLP-2
  VARIANT (1)...(1): Xaa = Arg, Lys or His, with an amino terminal group or an amino terminal blocking group
  VARIANT (2)...(2): Xaa = His or Tyr
  VARIANT (3)...(3): Xaa = is Ala, Gly, D-Ala, Pro, Ile, Nva (Norvaline), alpha -aminobutyric acid, or an Ala-replacement amino acid conferring on said analog resistance to DPP-IV enzyme
  VARIANT (4)...(4): Xaa = Asp, Glu, Pro or Hpro (hydroxyproline); or Xaa-Xaa in positions 3 and 4 taken together are Xaa(psi)(CH(OH)CH2)Xaa; Xaa(psi)(CH2NH2)Xaa or Xaa(psi)(CHCH)Xaa
  VARIANT (5)...(5): Xaa = Gly or Ala
  VARIANT (6)...(6): Xaa = Ser or Ala
  VARIANT (11)...(11): Xaa = Met, Leu, Ile or an oxidatively stable Met-replacement amino acid
  VARIANT (15)...(15): Xaa = Leu or Lys
  VARIANT (17)...(17): Xaa = Asn, Lys or Ala
  VARIANT (18)...(18): Xaa = Leu or Lys
  VARIANT (20)...(20): Xaa = Ala or Thr
  VARIANT (21)...(21): Xaa = Arg, Lys, His or Ala
  VARIANT (22)...(22): Xaa = Asp or Lys
  VARIANT (25)...(25): Xaa = Asn or Ala
  VARIANT (28)...(28): Xaa = Ile or Leu
  VARIANT (29)...(29): Xaa = Gln or His
  VARIANT (34)...(34): Xaa = Arg, Lys or His
  VARIANT (35)...(35): Xaa = Arg, Lys or His with a COOH, CONH2 or a C-terminal blocking group
XXXXXXFSDEXNTIXDXXAXXXFIXWLXXTKITXX

SEQ ID NO: 143 - protein, 34 aa, Artificial Sequence
  intestinotrophic analog of GLP-2
  VARIANT (1)...(1): Xaa = Arg, Lys or His, with an amino terminal group or an amino terminal blocking group
  VARIANT (2)...(2): Xaa = Arg, Lys or His
  VARIANT (3)...(3): Xaa = His or Tyr
  VARIANT (4)...(4): Xaa = is Ala, Gly, D-Ala, Pro, Ile, Nva (Norvaline), alpha -aminobutyric acid, or an Ala-replacement amino acid conferring on said analog resistance to DPP-IV enzyme
  VARIANT (5)...(5): Xaa = Asp, Glu, Pro or Hpro (hydroxyproline); or Xaa-Xaa in positions 4 and 5 taken together are Xaa(psi)(CH(OH)CH2)Xaa; Xaa(psi)(CH2NH2)Xaa or Xaa(psi)(CHCH)Xaa
  VARIANT (6)...(6): Xaa = Gly or Ala
  VARIANT (7)...(7): Xaa = Ser or Ala
  VARIANT (12)...(12): Xaa = Met, Leu, Ile or an oxidatively stable Met-replacement amino acid
  VARIANT (16)...(16): Xaa = Leu or Lys
  VARIANT (18)...(18): Xaa = Asn, Lys or Ala
  VARIANT (19)...(19): Xaa = Leu or Lys
  VARIANT (21)...(21): Xaa = Ala or Thr
  VARIANT (22)...(22): Xaa = Arg, Lys, His or Ala
  VARIANT (23)...(23): Xaa = Asp or Lys
  VARIANT (26)...(26): Xaa = Asn or Ala
  VARIANT (29)...(29): Xaa = Ile or Leu
  VARIANT (30)...(30): Xaa = Gln or His
XXXXXXXFSDEXNTIXDXXAXXXFIXWLXXTKIT

SEQ ID NO: 144 - protein, 35 aa, Artificial Sequence
  intestinotrophic analog of GLP-2
  VARIANT (1)...(1): Xaa = Arg, Lys or His, with an amino terminal group or an amino terminal blocking group
  VARIANT (2)...(2): Xaa = Arg, Lys or His
  VARIANT (3)...(3): Xaa = His or Tyr
  VARIANT (4)...(4): Xaa = is Ala, Gly, D-Ala, Pro, Ile, Nva (Norvaline), alpha -aminobutyric acid, or an Ala-replacement amino acid conferring on said analog resistance to DPP-IV enzyme
  VARIANT (5)...(5): Xaa = Asp, Glu, Pro or Hpro (hydroxyproline); or Xaa-Xaa in positions 4 and 5 taken together are Xaa(psi)(CH(OH)CH2)Xaa; Xaa(psi)(CH2NH2)Xaa or Xaa(psi)(CHCH)Xaa
  VARIANT (6)...(6): Xaa = Gly or Ala
  VARIANT (7)...(7): Xaa = Ser or Ala
  VARIANT (12)...(12): Xaa = Met, Leu, Ile or an oxidatively stable Met-replacement amino acid
  VARIANT (16)...(16): Xaa = Leu or Lys
  VARIANT (18)...(18): Xaa = Asn, Lys or Ala
  VARIANT (19)...(19): Xaa = Leu or Lys
  VARIANT (21)...(21): Xaa = Ala or Thr
  VARIANT (22)...(22): Xaa = Arg, Lys, His or Ala
  VARIANT (23)...(23): Xaa = Asp or Lys
  VARIANT (26)...(26): Xaa = Asn or Ala
  VARIANT (29)...(29): Xaa = Ile or Leu
  VARIANT (30)...(30): Xaa = Gln or His
  VARIANT (35)...(35): Xaa = Arg, Lys or His with a COOH, CONH2 or a C-terminal blocking group
XXXXXXXFSDEXNTIXDXXAXXXFIXWLXXTKITX

SEQ ID NO: 145 - protein, 36 aa, Artificial Sequence
  intestinotrophic analog of GLP-2
  VARIANT (1)...(1): Xaa = Arg, Lys or His, with an amino terminal group or an amino terminal blocking group
  VARIANT (2)...(2): Xaa = Arg, Lys or His
  VARIANT (3)...(3): Xaa = His or Tyr
  VARIANT (4)...(4): Xaa = is Ala, Gly, D-Ala, Pro, Ile, Nva (Norvaline), alpha -aminobutyric acid, or an Ala-replacement amino acid conferring on said analog resistance to DPP-IV enzyme
  VARIANT (5)...(5): Xaa = Asp, Glu, Pro or Hpro (hydroxyproline); or Xaa-Xaa in positions 4 and 5 taken together are Xaa(psi)(CH(OH)CH2)Xaa; Xaa(psi)(CH2NH2)Xaa or Xaa(psi)(CHCH)Xaa
  VARIANT (6)...(6): Xaa = Gly or Ala
  VARIANT (7)...(7): Xaa = Ser or Ala
  VARIANT (12)...(12): Xaa = Met, Leu, Ile or an oxidatively stable Met-replacement amino acid
  VARIANT (16)...(16): Xaa = Leu or Lys
  VARIANT (18)...(18): Xaa = Asn, Lys or Ala
  VARIANT (19)...(19): Xaa = Leu or Lys
  VARIANT (21)...(21): Xaa = Ala or Thr
  VARIANT (22)...(22): Xaa = Arg, Lys, His or Ala
  VARIANT (23)...(23): Xaa = Asp or Lys
  VARIANT (26)...(26): Xaa = Asn or Ala
  VARIANT (29)...(29): Xaa = Ile or Leu
  VARIANT (30)...(30): Xaa = Gln or His
  VARIANT (35)...(35): Xaa = Arg, Lys or His
  VARIANT (36)...(36): Xaa = Arg, Lys or His with a COOH, CONH2 or a C-terminal blocking group
XXXXXXXFSDEXNTIXDXXAXXXFIXWLXXTKITXX

SEQ ID NO: 146 - protein, 32 aa, Artificial Sequence
  intestinotrophic analog of GLP-2
  VARIANT (1)...(1): Xaa = His or Tyr, with an amino terminal group or an amino terminal blocking group
  VARIANT (2)...(2): Xaa = is Ala, Gly, D-Ala, Pro, Ile, Nva (Norvaline), alpha -aminobutyric acid, or an Ala-replacement amino acid conferring on said analog resistance to DPP-IV enzyme
  VARIANT (3)...(3): Xaa = Asp, Glu, Pro or Hpro (hydroxyproline); or Xaa-Xaa in positions 2 and 3 taken together are Xaa(psi)(CH(OH)CH2)Xaa; Xaa(psi)(CH2NH2)Xaa or Xaa(psi)(CHCH)Xaa
  VARIANT (4)...(4): Xaa = Gly or Ala
  VARIANT (5)...(5): Xaa = Ser or Ala
  VARIANT (10)...(10): Xaa = Met, Leu, Ile or an oxidatively stable Met-replacement amino acid
  VARIANT (14)...(14): Xaa = Leu or Lys
  VARIANT (16)...(16): Xaa = Asn, Lys or Ala
  VARIANT (17)...(17): Xaa = Leu or Lys
  VARIANT (19)...(19): Xaa = Ala or Thr
  VARIANT (20)...(20): Xaa = Arg, Lys, His or Ala
  VARIANT (21)...(21): Xaa = Asp or Lys
  VARIANT (27)...(27): Xaa = Ile or Leu
  VARIANT (28)...(28): Xaa = Gln or His
XXXXXFSDEXNTIXDXXAXXXFVQWLXXTKIT

SEQ ID NO: 147 - protein, 33 aa, Artificial Sequence
  intestinotrophic analog of GLP-2
  VARIANT (1)...(1): Xaa = His or Tyr, with an amino terminal group or an amino terminal blocking group
  VARIANT (2)...(2): Xaa = is Ala, Gly, D-Ala, Pro, Ile, Nva (Norvaline), alpha -aminobutyric acid, or an Ala-replacement amino acid conferring on said analog resistance to DPP-IV enzyme
  VARIANT (3)...(3): Xaa = Asp, Glu, Pro or Hpro (hydroxyproline); or Xaa-Xaa in positions 2 and 3 taken together are Xaa(psi)(CH(OH)CH2)Xaa; Xaa(psi)(CH2NH2)Xaa or Xaa(psi)(CHCH)Xaa
  VARIANT (4)...(4): Xaa = Gly or Ala
  VARIANT (5)...(5): Xaa = Ser or Ala
  VARIANT (10)...(10): Xaa = Met, Leu, Ile or an oxidatively stable Met-replacement amino acid
  VARIANT (14)...(14): Xaa = Leu or Lys
  VARIANT (16)...(16): Xaa = Asn, Lys or Ala
  VARIANT (17)...(17): Xaa = Leu or Lys
  VARIANT (19)...(19): Xaa = Ala or Thr
  VARIANT (20)...(20): Xaa = Arg, Lys, His or Ala
  VARIANT (21)...(21): Xaa = Asp or Lys
  VARIANT (27)...(27): Xaa = Ile or Leu
  VARIANT (28)...(28): Xaa = Gln or His
  VARIANT (33)...(33): Xaa = Arg, Lys or His with a COOH, CONH2 or a C-terminal blocking group
XXXXXFSDEXNTIXDXXAXXXFVQWLXXTKITX

SEQ ID NO: 148 - protein, 34 aa, Artificial Sequence
  intestinotrophic analog of GLP-2
  VARIANT (1)...(1): Xaa = His or Tyr, with an amino terminal group or an amino terminal blocking group
  VARIANT (2)...(2): Xaa = is Ala, Gly, D-Ala, Pro, Ile, Nva (Norvaline), alpha -aminobutyric acid, or an Ala-replacement amino acid conferring on said analog resistance to DPP-IV enzyme
  VARIANT (3)...(3): Xaa = Asp, Glu, Pro or Hpro (hydroxyproline); or Xaa-Xaa in positions 2 and 3 taken together are Xaa(psi)(CH(OH)CH2)Xaa; Xaa(psi)(CH2NH2)Xaa or Xaa(psi)(CHCH)Xaa
  VARIANT (4)...(4): Xaa = Gly or Ala
  VARIANT (5)...(5): Xaa = Ser or Ala
  VARIANT (10)...(10): Xaa = Met, Leu, Ile or an oxidatively stable Met-replacement amino acid
  VARIANT (14)...(14): Xaa = Leu or Lys
  VARIANT (16)...(16): Xaa = Asn, Lys or Ala
  VARIANT (17)...(17): Xaa = Leu or Lys
  VARIANT (19)...(19): Xaa = Ala or Thr
  VARIANT (20)...(20): Xaa = Arg, Lys, His or Ala
  VARIANT (21)...(21): Xaa = Asp or Lys
  VARIANT (27)...(27): Xaa = Ile or Leu
  VARIANT (28)...(28): Xaa = Gln or His
  VARIANT (33)...(33): Xaa = Arg, Lys or His
  VARIANT (34)...(34): Xaa = Arg, Lys or His with a COOH, CONH2 or a C-terminal blocking group
XXXXXFSDEXNTIXDXXAXXXFVQWLXXTKITXX

SEQ ID NO: 149 - protein, 33 aa, Artificial Sequence
  intestinotrophic analog of GLP-2
  VARIANT (1)...(1): Xaa = Arg, Lys or His, with an amino terminal group or an amino terminal blocking group
  VARIANT (2)...(2): Xaa = His or Tyr
  VARIANT (3)...(3): Xaa = is Ala, Gly, D-Ala, Pro, Ile, Nva (Norvaline), alpha -aminobutyric acid, or an Ala-replacement amino acid conferring on said analog resistance to DPP-IV enzyme
  VARIANT (4)...(4): Xaa = Asp, Glu, Pro or Hpro (hydroxyproline); or Xaa-Xaa in positions 3 and 4 taken together are Xaa(psi)(CH(OH)CH2)Xaa; Xaa(psi)(CH2NH2)Xaa or Xaa(psi)(CHCH)Xaa
  VARIANT (5)...(5): Xaa = Gly or Ala
  VARIANT (6)...(6): Xaa = Ser or Ala
  VARIANT (11)...(11): Xaa = Met, Leu, Ile or an oxidatively stable Met-replacement amino acid
  VARIANT (15)...(15): Xaa = Leu or Lys
  VARIANT (17)...(17): Xaa = Asn, Lys or Ala
  VARIANT (18)...(18): Xaa = Leu or Lys
  VARIANT (20)...(20): Xaa = Ala or Thr
  VARIANT (21)...(21): Xaa = Arg, Lys, His or Ala
  VARIANT (22)...(22): Xaa = Asp or Lys
  VARIANT (28)...(28): Xaa = Ile or Leu
  VARIANT (29)...(29): Xaa = Gln or His
XXXXXXFSDEXNTIXDXXAXXXFVQWLXXTKIT

SEQ ID NO: 150 - protein, 34 aa, Artificial Sequence
  intestinotrophic analog of GLP-2
  VARIANT (1)...(1): Xaa = Arg, Lys or His, with an amino terminal group or an amino terminal blocking group
  VARIANT (2)...(2): Xaa = His or Tyr
  VARIANT (3)...(3): Xaa = is Ala, Gly, D-Ala, Pro, Ile, Nva (Norvaline), alpha -aminobutyric acid, or an Ala-replacement amino acid conferring on said analog resistance to DPP-IV enzyme
  VARIANT (4)...(4): Xaa = Asp, Glu, Pro or Hpro (hydroxyproline); or Xaa-Xaa in positions 3 and 4 taken together are Xaa(psi)(CH(OH)CH2)Xaa; Xaa(psi)(CH2NH2)Xaa or Xaa(psi)(CHCH)Xaa
  VARIANT (5)...(5): Xaa = Gly or Ala
  VARIANT (6)...(6): Xaa = Ser or Ala
  VARIANT (11)...(11): Xaa = Met, Leu, Ile or an oxidatively stable Met-replacement amino acid
  VARIANT (15)...(15): Xaa = Leu or Lys
  VARIANT (17)...(17): Xaa = Asn, Lys or Ala
  VARIANT (18)...(18): Xaa = Leu or Lys
  VARIANT (20)...(20): Xaa = Ala or Thr
  VARIANT (21)...(21): Xaa = Arg, Lys, His or Ala
  VARIANT (22)...(22): Xaa = Asp or Lys
  VARIANT (28)...(28): Xaa = Ile or Leu
  VARIANT (29)...(29): Xaa = Gln or His
  VARIANT (34)...(34): Xaa = Arg, Lys or His with a COOH, CONH2 or a C-terminal blocking group
XXXXXXFSDEXNTIXDXXAXXXFVQWLXXTKITX

SEQ ID NO: 151 - protein, 35 aa, Artificial Sequence
  intestinotrophic analog of GLP-2
  VARIANT (1)...(1): Xaa = Arg, Lys or His, with an amino terminal group or an amino terminal blocking group
  VARIANT (2)...(2): Xaa = His or Tyr
  VARIANT (3)...(3): Xaa = is Ala, Gly, D-Ala, Pro, Ile, Nva (Norvaline), alpha -aminobutyric acid, or an Ala-replacement amino acid conferring on said analog resistance to DPP-IV enzyme
  VARIANT (4)...(4): Xaa = Asp, Glu, Pro or Hpro (hydroxyproline); or Xaa-Xaa in positions 3 and 4 taken together are Xaa(psi)(CH(OH)CH2)Xaa; Xaa(psi)(CH2NH2)Xaa or Xaa(psi)(CHCH)Xaa
  VARIANT (5)...(5): Xaa = Gly or Ala
  VARIANT (6)...(6): Xaa = Ser or Ala
  VARIANT (11)...(11): Xaa = Met, Leu, Ile or an oxidatively stable Met-replacement amino acid
  VARIANT (15)...(15): Xaa = Leu or Lys
  VARIANT (17)...(17): Xaa = Asn, Lys or Ala
  VARIANT (18)...(18): Xaa = Leu or Lys
  VARIANT (20)...(20): Xaa = Ala or Thr
  VARIANT (21)...(21): Xaa = Arg, Lys, His or Ala
  VARIANT (22)...(22): Xaa = Asp or Lys
  VARIANT (28)...(28): Xaa = Ile or Leu
  VARIANT (29)...(29): Xaa = Gln or His
  VARIANT (34)...(34): Xaa = Arg, Lys or His
  VARIANT (35)...(35): Xaa = Arg, Lys or His with a COOH, CONH2 or a C-terminal blocking group
XXXXXXFSDEXNTIXDXXAXXXFVQWLXXTKITXX

SEQ ID NO: 152 - protein, 34 aa, Artificial Sequence
  intestinotrophic analog of GLP-2
  VARIANT (1)...(1): Xaa = Arg, Lys or His, with an amino terminal group or an amino terminal blocking group
  VARIANT (2)...(2): Xaa = Arg, Lys or His
  VARIANT (3)...(3): Xaa = His or Tyr
  VARIANT (4)...(4): Xaa = is Ala, Gly, D-Ala, Pro, Ile, Nva (Norvaline), alpha -aminobutyric acid, or an Ala-replacement amino acid conferring on said analog resistance to DPP-IV enzyme
  VARIANT (5)...(5): Xaa = Asp, Glu, Pro or Hpro (hydroxyproline); or Xaa-Xaa in positions 4 and 5 taken together are Xaa(psi)(CH(OH)CH2)Xaa; Xaa(psi)(CH2NH2)Xaa or Xaa(psi)(CHCH)Xaa
  VARIANT (6)...(6): Xaa = Gly or Ala
  VARIANT (7)...(7): Xaa = Ser or Ala
  VARIANT (12)...(12): Xaa = Met, Leu, Ile or an oxidatively stable Met-replacement amino acid
  VARIANT (16)...(16): Xaa = Leu or Lys
  VARIANT (18)...(18): Xaa = Asn, Lys or Ala
  VARIANT (19)...(19): Xaa = Leu or Lys
  VARIANT (21)...(21): Xaa = Ala or Thr
  VARIANT (22)...(22): Xaa = Arg, Lys, His or Ala
  VARIANT (23)...(23): Xaa = Asp or Lys
  VARIANT (29)...(29): Xaa = Ile or Leu
  VARIANT (30)...(30): Xaa = Gln or His
XXXXXXXFSDEXNTIXDXXAXXXFVQWLXXTKIT

SEQ ID NO: 153 - protein, 35 aa, Artificial Sequence
  intestinotrophic analog of GLP-2
  VARIANT (1)...(1): Xaa = Arg, Lys or His, with an amino terminal group or an amino terminal blocking group
  VARIANT (2)...(2): Xaa = Arg, Lys or His
  VARIANT (3)...(3): Xaa = His or Tyr
  VARIANT (4)...(4): Xaa = is Ala, Gly, D-Ala, Pro, Ile, Nva (Norvaline), alpha -aminobutyric acid, or an Ala-replacement amino acid conferring on said analog resistance to DPP-IV enzyme
  VARIANT (5)...(5): Xaa = Asp, Glu, Pro or Hpro (hydroxyproline); or Xaa-Xaa in positions 4 and 5 taken together are Xaa(psi)(CH(OH)CH2)Xaa; Xaa(psi)(CH2NH2)Xaa or Xaa(psi)(CHCH)Xaa
  VARIANT (6)...(6): Xaa = Gly or Ala
  VARIANT (7)...(7): Xaa = Ser or Ala
  VARIANT (12)...(12): Xaa = Met, Leu, Ile or an oxidatively stable Met-replacement amino acid
  VARIANT (16)...(16): Xaa = Leu or Lys
  VARIANT (18)...(18): Xaa = Asn, Lys or Ala
  VARIANT (19)...(19): Xaa = Leu or Lys
  VARIANT (21)...(21): Xaa = Ala or Thr
  VARIANT (22)...(22): Xaa = Arg, Lys, His or Ala
  VARIANT (23)...(23): Xaa = Asp or Lys
  VARIANT (29)...(29): Xaa = Ile or Leu
  VARIANT (30)...(30): Xaa = Gln or His
  VARIANT (35)...(35): Xaa = Arg, Lys or His with a COOH, CONH2 or a C-terminal blocking group
XXXXXXXFSDEXNTIXDXXAXXXFVQWLXXTKITX

SEQ ID NO: 154 - protein, 36 aa, Artificial Sequence
  intestinotrophic analog of GLP-2
  VARIANT (1)...(1): Xaa = Arg, Lys or His, with an amino terminal group or an amino terminal blocking group
  VARIANT (2)...(2): Xaa = Arg, Lys or His
  VARIANT (3)...(3): Xaa = His or Tyr
  VARIANT (4)...(4): Xaa = is Ala, Gly, D-Ala, Pro, Ile, Nva (Norvaline), alpha -aminobutyric acid, or an Ala-replacement amino acid conferring on said analog resistance to DPP-IV enzyme
  VARIANT (5)...(5): Xaa = Asp, Glu, Pro or Hpro (hydroxyproline); or Xaa-Xaa in positions 4 and 5 taken together are Xaa(psi)(CH(OH)CH2)Xaa; Xaa(psi)(CH2NH2)Xaa or Xaa(psi)(CHCH)Xaa
  VARIANT (6)...(6): Xaa = Gly or Ala
  VARIANT (7)...(7): Xaa = Ser or Ala
  VARIANT (12)...(12): Xaa = Met, Leu, Ile or an oxidatively stable Met-replacement amino acid
  VARIANT (16)...(16): Xaa = Leu or Lys
  VARIANT (18)...(18): Xaa = Asn, Lys or Ala
  VARIANT (19)...(19): Xaa = Leu or Lys
  VARIANT (21)...(21): Xaa = Ala or Thr
  VARIANT (22)...(22): Xaa = Arg, Lys, His or Ala
  VARIANT (23)...(23): Xaa = Asp or Lys
  VARIANT (29)...(29): Xaa = Ile or Leu
  VARIANT (30)...(30): Xaa = Gln or His
  VARIANT (35)...(35): Xaa = Arg, Lys or His
  VARIANT (36)...(36): Xaa = Arg, Lys or His with a COOH, CONH2 or a C-terminal blocking group
XXXXXXXFSDEXNTIXDXXAXXXFVQWLXXTKITXX

SEQ ID NO: 155 - protein, 32 aa, Artificial Sequence
  intestinotrophic analog of GLP-2
  VARIANT (1)...(1): Xaa = His or Tyr, with an amino terminal group or an amino terminal blocking group
  VARIANT (2)...(2): Xaa = is Ala, Gly, D-Ala, Pro, Ile, Nva (Norvaline), alpha -aminobutyric acid, or an Ala-replacement amino acid conferring on said analog resistance to DPP-IV enzyme
  VARIANT (3)...(3): Xaa = Asp, Glu, Pro or Hpro (hydroxyproline); or Xaa-Xaa in positions 2 and 3 taken together are Xaa(psi)(CH(OH)CH2)Xaa; Xaa(psi)(CH2NH2)Xaa or Xaa(psi)(CHCH)Xaa
  VARIANT (4)...(4): Xaa = Gly or Ala
  VARIANT (5)...(5): Xaa = Ser or Ala
  VARIANT (10)...(10): Xaa = Met, Leu, Ile or an oxidatively stable Met-replacement amino acid
  VARIANT (14)...(14): Xaa = Leu or Lys
  VARIANT (16)...(16): Xaa = Asn, Lys or Ala
  VARIANT (17)...(17): Xaa = Leu or Lys
  VARIANT (19)...(19): Xaa = Ala or Thr
  VARIANT (20)...(20): Xaa = Arg, Lys, His or Ala
  VARIANT (21)...(21): Xaa = Asp or Lys
  VARIANT (24)...(24): Xaa = Asn or Ala
  VARIANT (27)...(27): Xaa = Ile or Leu
  VARIANT (28)...(28): Xaa = Gln or His
XXXXXFSDGXNTVXDXXAXXXFIXWLXXTKIT

SEQ ID NO: 156 - protein, 33 aa, Artificial Sequence
  intestinotrophic analog of GLP-2
  VARIANT (1)...(1): Xaa = His or Tyr, with an amino terminal group or an amino terminal blocking group
  VARIANT (2)...(2): Xaa = is Ala, Gly, D-Ala, Pro, Ile, Nva (Norvaline), alpha -aminobutyric acid, or an Ala-replacement amino acid conferring on said analog resistance to DPP-IV enzyme
  VARIANT (3)...(3): Xaa = Asp, Glu, Pro or Hpro (hydroxyproline); or Xaa-Xaa in positions 2 and 3 taken together are Xaa(psi)(CH(OH)CH2)Xaa; Xaa(psi)(CH2NH2)Xaa or Xaa(psi)(CHCH)Xaa
  VARIANT (4)...(4): Xaa = Gly or Ala
  VARIANT (5)...(5): Xaa = Ser or Ala
  VARIANT (10)...(10): Xaa = Met, Leu, Ile or an oxidatively stable Met-replacement amino acid
  VARIANT (14)...(14): Xaa = Leu or Lys
  VARIANT (16)...(16): Xaa = Asn, Lys or Ala
  VARIANT (17)...(17): Xaa = Leu or Lys
  VARIANT (19)...(19): Xaa = Ala or Thr
  VARIANT (20)...(20): Xaa = Arg, Lys, His or Ala
  VARIANT (21)...(21): Xaa = Asp or Lys
  VARIANT (24)...(24): Xaa = Asn or Ala
  VARIANT (27)...(27): Xaa = Ile or Leu
  VARIANT (28)...(28): Xaa = Gln or His
  VARIANT (33)...(33): Xaa = Arg, Lys or His with a COOH, CONH2 or a C-terminal blocking group
XXXXXFSDGXNTVXDXXAXXXFIXWLXXTKITX

SEQ ID NO: 157 - protein, 34 aa, Artificial Sequence
  intestinotrophic analog of GLP-2
  VARIANT (1)...(1): Xaa = His or Tyr, with an amino terminal group or an amino terminal blocking group
  VARIANT (2)...(2): Xaa = is Ala, Gly, D-Ala, Pro, Ile, Nva (Norvaline), alpha -aminobutyric acid, or an Ala-replacement amino acid conferring on said analog resistance to DPP-IV enzyme
  VARIANT (3)...(3): Xaa = Asp, Glu, Pro or Hpro (hydroxyproline); or Xaa-Xaa in positions 2 and 3 taken together are Xaa(psi)(CH(OH)CH2)Xaa; Xaa(psi)(CH2NH2)Xaa or Xaa(psi)(CHCH)Xaa
  VARIANT (4)...(4): Xaa = Gly or Ala
  VARIANT (5)...(5): Xaa = Ser or Ala
  VARIANT (10)...(10): Xaa = Met, Leu, Ile or an oxidatively stable Met-replacement amino acid
  VARIANT (14)...(14): Xaa = Leu or Lys
  VARIANT (16)...(16): Xaa = Asn, Lys or Ala
  VARIANT (17)...(17): Xaa = Leu or Lys
  VARIANT (19)...(19): Xaa = Ala or Thr
  VARIANT (20)...(20): Xaa = Arg, Lys, His or Ala
  VARIANT (21)...(21): Xaa = Asp or Lys
  VARIANT (24)...(24): Xaa = Asn or Ala
  VARIANT (27)...(27): Xaa = Ile or Leu
  VARIANT (28)...(28): Xaa = Gln or His
  VARIANT (33)...(33): Xaa = Arg, Lys or His
  VARIANT (34)...(34): Xaa = Arg, Lys or His with a COOH, CONH2 or a C-terminal blocking group
XXXXXFSDGXNTVXDXXAXXXFIXWLXXTKITXX

SEQ ID NO: 158 - protein, 33 aa, Artificial Sequence
  intestinotrophic analog of GLP-2
  VARIANT (1)...(1): Xaa = Arg, Lys or His, with an amino terminal group or an amino terminal blocking group
  VARIANT (2)...(2): Xaa = His or Tyr
  VARIANT (3)...(3): Xaa = is Ala, Gly, D-Ala, Pro, Ile, Nva (Norvaline), alpha -aminobutyric acid, or an Ala-replacement amino acid conferring on said analog resistance to DPP-IV enzyme
  VARIANT (4)...(4): Xaa = Asp, Glu, Pro or Hpro (hydroxyproline); or Xaa-Xaa in positions 3 and 4 taken together are Xaa(psi)(CH(OH)CH2)Xaa; Xaa(psi)(CH2NH2)Xaa or Xaa(psi)(CHCH)Xaa
  VARIANT (5)...(5): Xaa = Gly or Ala
  VARIANT (6)...(6): Xaa = Ser or Ala
  VARIANT (11)...(11): Xaa = Met, Leu, Ile or an oxidatively stable Met-replacement amino acid
  VARIANT (15)...(15): Xaa = Leu or Lys
  VARIANT (17)...(17): Xaa = Asn, Lys or Ala
  VARIANT (18)...(18): Xaa = Leu or Lys
  VARIANT (20)...(20): Xaa = Ala or Thr
  VARIANT (21)...(21): Xaa = Arg, Lys, His or Ala
  VARIANT (22)...(22): Xaa = Asp or Lys
  VARIANT (25)...(25): Xaa = Asn or Ala
  VARIANT (28)...(28): Xaa = Ile or Leu
  VARIANT (29)...(29): Xaa = Gln or His
XXXXXXFSDGXNTVXDXXAXXXFIXWLXXTKIT

SEQ ID NO: 159 - protein, 34 aa, Artificial Sequence
  intestinotrophic analog of GLP-2
  VARIANT (1)...(1): Xaa = Arg, Lys or His, with an amino terminal group or an amino terminal blocking group
  VARIANT (2)...(2): Xaa = His or Tyr
  VARIANT (3)...(3): Xaa = is Ala, Gly, D-Ala, Pro, Ile, Nva (Norvaline), alpha -aminobutyric acid, or an Ala-replacement amino acid conferring on said analog resistance to DPP-IV enzyme
  VARIANT (4)...(4): Xaa = Asp, Glu, Pro or Hpro (hydroxyproline); or Xaa-Xaa in positions 3 and 4 taken together are Xaa(psi)(CH(OH)CH2)Xaa; Xaa(psi)(CH2NH2)Xaa or Xaa(psi)(CHCH)Xaa
  VARIANT (5)...(5): Xaa = Gly or Ala
  VARIANT (6)...(6): Xaa = Ser or Ala
  VARIANT (11)...(11): Xaa = Met, Leu, Ile or an oxidatively stable Met-replacement amino acid
  VARIANT (15)...(15): Xaa = Leu or Lys
  VARIANT (17)...(17): Xaa = Asn, Lys or Ala
  VARIANT (18)...(18): Xaa = Leu or Lys
  VARIANT (20)...(20): Xaa = Ala or Thr
  VARIANT (21)...(21): Xaa = Arg, Lys, His or Ala
  VARIANT (22)...(22): Xaa = Asp or Lys
  VARIANT (25)...(25): Xaa = Asn or Ala
  VARIANT (28)...(28): Xaa = Ile or Leu
  VARIANT (29)...(29): Xaa = Gln or His
  VARIANT (34)...(34): Xaa = Arg, Lys or His with a COOH, CONH2 or a C-terminal blocking group
XXXXXXFSDGXNTVXDXXAXXXFIXWLXXTKITX

SEQ ID NO: 160 - protein, 35 aa, Artificial Sequence
  intestinotrophic analog of GLP-2
  VARIANT (1)...(1): Xaa = Arg, Lys or His, with an amino terminal group or an amino terminal blocking group
  VARIANT (2)...(2): Xaa = His or Tyr
  VARIANT (3)...(3): Xaa = is Ala, Gly, D-Ala, Pro, Ile, Nva (Norvaline), alpha -aminobutyric acid, or an Ala-replacement amino acid conferring on said analog resistance to DPP-IV enzyme
  VARIANT (4)...(4): Xaa = Asp, Glu, Pro or Hpro (hydroxyproline); or Xaa-Xaa in positions 3 and 4 taken together are Xaa(psi)(CH(OH)CH2)Xaa; Xaa(psi)(CH2NH2)Xaa or Xaa(psi)(CHCH)Xaa
  VARIANT (5)...(5): Xaa = Gly or Ala
  VARIANT (6)...(6): Xaa = Ser or Ala
  VARIANT (11)...(11): Xaa = Met, Leu, Ile or an oxidatively stable Met-replacement amino acid
  VARIANT (15)...(15): Xaa = Leu or Lys
  VARIANT (17)...(17): Xaa = Asn, Lys or Ala
  VARIANT (18)...(18): Xaa = Leu or Lys
  VARIANT (20)...(20): Xaa = Ala or Thr
  VARIANT (21)...(21): Xaa = Arg, Lys, His or Ala
  VARIANT (22)...(22): Xaa = Asp or Lys
  VARIANT (25)...(25): Xaa = Asn or Ala
  VARIANT (28)...(28): Xaa = Ile or Leu
  VARIANT (29)...(29): Xaa = Gln or His
  VARIANT (34)...(34): Xaa = Arg, Lys or His
  VARIANT (35)...(35): Xaa = Arg, Lys or His with a COOH, CONH2 or a C-terminal blocking group
XXXXXXFSDGXNTVXDXXAXXXFIXWLXXTKITXX

SEQ ID NO: 161 - protein, 34 aa, Artificial Sequence
  intestinotrophic analog of GLP-2
  VARIANT (1)...(1): Xaa = Arg, Lys or His, with an amino terminal group or an amino terminal blocking group
  VARIANT (2)...(2): Xaa = Arg, Lys or His
  VARIANT (3)...(3): Xaa = His or Tyr
  VARIANT (4)...(4): Xaa = is Ala, Gly, D-Ala, Pro, Ile, Nva (Norvaline), alpha -aminobutyric acid, or an Ala-replacement amino acid conferring on said analog resistance to DPP-IV enzyme
  VARIANT (5)...(5): Xaa = Asp, Glu, Pro or Hpro (hydroxyproline); or Xaa-Xaa in positions 4 and 5 taken together are Xaa(psi)(CH(OH)CH2)Xaa; Xaa(psi)(CH2NH2)Xaa or Xaa(psi)(CHCH)Xaa
  VARIANT (6)...(6): Xaa = Gly or Ala
  VARIANT (7)...(7): Xaa = Ser or Ala
  VARIANT (12)...(12): Xaa = Met, Leu, Ile or an oxidatively stable Met-replacement amino acid
  VARIANT (16)...(16): Xaa = Leu or Lys
  VARIANT (18)...(18): Xaa = Asn, Lys or Ala
  VARIANT (19)...(19): Xaa = Leu or Lys
  VARIANT (21)...(21): Xaa = Ala or Thr
  VARIANT (22)...(22): Xaa = Arg, Lys, His or Ala
  VARIANT (23)...(23): Xaa = Asp or Lys
  VARIANT (26)...(26): Xaa = Asn or Ala
  VARIANT (29)...(29): Xaa = Ile or Leu
  VARIANT (30)...(30): Xaa = Gln or His
XXXXXXXFSDGXNTVXDXXAXXXFIXWLXXTKIT

SEQ ID NO: 162 - protein, 35 aa, Artificial Sequence
  intestinotrophic analog of GLP-2
  VARIANT (1)...(1): Xaa = Arg, Lys or His, with an amino terminal group or an amino terminal blocking group
  VARIANT (2)...(2): Xaa = Arg, Lys or His
  VARIANT (3)...(3): Xaa = His or Tyr
  VARIANT (4)...(4): Xaa = is Ala, Gly, D-Ala, Pro, Ile, Nva (Norvaline), alpha -aminobutyric acid, or an Ala-replacement amino acid conferring on said analog resistance to DPP-IV enzyme
  VARIANT (5)...(5): Xaa = Asp, Glu, Pro or Hpro (hydroxyproline); or Xaa-Xaa in positions 4 and 5 taken together are Xaa(psi)(CH(OH)CH2)Xaa; Xaa(psi)(CH2NH2)Xaa or Xaa(psi)(CHCH)Xaa
  VARIANT (6)...(6): Xaa = Gly or Ala
  VARIANT (7)...(7): Xaa = Ser or Ala
  VARIANT (12)...(12): Xaa = Met, Leu, Ile or an oxidatively stable Met-replacement amino acid
  VARIANT (16)...(16): Xaa = Leu or Lys
  VARIANT (18)...(18): Xaa = Asn, Lys or Ala
  VARIANT (19)...(19): Xaa = Leu or Lys
  VARIANT (21)...(21): Xaa = Ala or Thr
  VARIANT (22)...(22): Xaa = Arg, Lys, His or Ala
  VARIANT (23)...(23): Xaa = Asp or Lys
  VARIANT (26)...(26): Xaa = Asn or Ala
  VARIANT (29)...(29): Xaa = Ile or Leu
  VARIANT (30)...(30): Xaa = Gln or His
  VARIANT (35)...(35): Xaa = Arg, Lys or His with a COOH, CONH2 or a C-terminal blocking group
XXXXXXXFSDGXNTVXDXXAXXXFIXWLXXTKITX

SEQ ID NO: 163 - protein, 36 aa, Artificial Sequence
  intestinotrophic analog of GLP-2
  VARIANT (1)...(1): Xaa = Arg, Lys or His, with an amino terminal group or an amino terminal blocking group
  VARIANT (2)...(2): Xaa = Arg, Lys or His
  VARIANT (3)...(3): Xaa = His or Tyr
  VARIANT (4)...(4): Xaa = is Ala, Gly, D-Ala, Pro, Ile, Nva (Norvaline), alpha -aminobutyric acid, or an Ala-replacement amino acid conferring on said analog resistance to DPP-IV enzyme
  VARIANT (5)...(5): Xaa = Asp, Glu, Pro or Hpro (hydroxyproline); or Xaa-Xaa in positions 4 and 5 taken together are Xaa(psi)(CH(OH)CH2)Xaa; Xaa(psi)(CH2NH2)Xaa or Xaa(psi)(CHCH)Xaa
  VARIANT (6)...(6): Xaa = Gly or Ala
  VARIANT (7)...(7): Xaa = Ser or Ala
  VARIANT (12)...(12): Xaa = Met, Leu, Ile or an oxidatively stable Met-replacement amino acid
  VARIANT (16)...(16): Xaa = Leu or Lys
  VARIANT (18)...(18): Xaa = Asn, Lys or Ala
  VARIANT (19)...(19): Xaa = Leu or Lys
  VARIANT (21)...(21): Xaa = Ala or Thr
  VARIANT (22)...(22): Xaa = Arg, Lys, His or Ala
  VARIANT (23)...(23): Xaa = Asp or Lys
  VARIANT (26)...(26): Xaa = Asn or Ala
  VARIANT (29)...(29): Xaa = Ile or Leu
  VARIANT (30)...(30): Xaa = Gln or His
  VARIANT (35)...(35): Xaa = Arg, Lys or His
  VARIANT (36)...(36): Xaa = Arg, Lys or His with a COOH, CONH2 or a C-terminal blocking group
XXXXXXXFSDGXNTVXDXXAXXXFIXWLXXTKITXX

SEQ ID NO: 164 - protein, 32 aa, Artificial Sequence
  intestinotrophic analog of GLP-2
  VARIANT (1)...(1): Xaa = His or Tyr, with an amino terminal group or an amino terminal blocking group
  VARIANT (2)...(2): Xaa = is Ala, Gly, D-Ala, Pro, Ile, Nva (Norvaline), alpha -aminobutyric acid, or an Ala-replacement amino acid conferring on said analog resistance to DPP-IV enzyme
  VARIANT (3)...(3): Xaa = Asp, Glu, Pro or Hpro (hydroxyproline); or Xaa-Xaa in positions 2 and 3 taken together are Xaa(psi)(CH(OH)CH2)Xaa; Xaa(psi)(CH2NH2)Xaa or Xaa(psi)(CHCH)Xaa
  VARIANT (4)...(4): Xaa = Gly or Ala
  VARIANT (5)...(5): Xaa = Ser or Ala
  VARIANT (10)...(10): Xaa = Met, Leu, Ile or an oxidatively stable Met-replacement amino acid
  VARIANT (14)...(14): Xaa = Leu or Lys
  VARIANT (16)...(16): Xaa = Asn, Lys or Ala
  VARIANT (17)...(17): Xaa = Leu or Lys
  VARIANT (19)...(19): Xaa = Ala or Thr
  VARIANT (20)...(20): Xaa = Arg, Lys, His or Ala
  VARIANT (21)...(21): Xaa = Asp or Lys
  VARIANT (27)...(27): Xaa = Ile or Leu
  VARIANT (28)...(28): Xaa = Gln or His
XXXXXFSDGXNTVXDXXAXXXFVQWLXXTKIT

SEQ ID NO: 165 - protein, 33 aa, Artificial Sequence
  intestinotrophic analog of GLP-2
  VARIANT (1)...(1): Xaa = His or Tyr, with an amino terminal group or an amino terminal blocking group
  VARIANT (2)...(2): Xaa = is Ala, Gly, D-Ala, Pro, Ile, Nva (Norvaline), alpha -aminobutyric acid, or an Ala-replacement amino acid conferring on said analog resistance to DPP-IV enzyme
  VARIANT (3)...(3): Xaa = Asp, Glu, Pro or Hpro (hydroxyproline); or Xaa-Xaa in positions 2 and 3 taken together are Xaa(psi)(CH(OH)CH2)Xaa; Xaa(psi)(CH2NH2)Xaa or Xaa(psi)(CHCH)Xaa
  VARIANT (4)...(4): Xaa = Gly or Ala
  VARIANT (5)...(5): Xaa = Ser or Ala
  VARIANT (10)...(10): Xaa = Met, Leu, Ile or an oxidatively stable Met-replacement amino acid
  VARIANT (14)...(14): Xaa = Leu or Lys
  VARIANT (16)...(16): Xaa = Asn, Lys or Ala
  VARIANT (17)...(17): Xaa = Leu or Lys
  VARIANT (19)...(19): Xaa = Ala or Thr
  VARIANT (20)...(20): Xaa = Arg, Lys, His or Ala
  VARIANT (21)...(21): Xaa = Asp or Lys
  VARIANT (27)...(27): Xaa = Ile or Leu
  VARIANT (28)...(28): Xaa = Gln or His
  VARIANT (33)...(33): Xaa = Arg, Lys or His with a COOH, CONH2 or a C-terminal blocking group
XXXXXFSDGXNTVXDXXAXXXFVQWLXXTKITX

SEQ ID NO: 166 - protein, 34 aa, Artificial Sequence
  intestinotrophic analog of GLP-2
  VARIANT (1)...(1): Xaa = His or Tyr, with an amino terminal group or an amino terminal blocking group
  VARIANT (2)...(2): Xaa = is Ala, Gly, D-Ala, Pro, Ile, Nva (Norvaline), alpha -aminobutyric acid, or an Ala-replacement amino acid conferring on said analog resistance to DPP-IV enzyme
  VARIANT (3)...(3): Xaa = Asp, Glu, Pro or Hpro (hydroxyproline); or Xaa-Xaa in positions 2 and 3 taken together are Xaa(psi)(CH(OH)CH2)Xaa; Xaa(psi)(CH2NH2)Xaa or Xaa(psi)(CHCH)Xaa
  VARIANT (4)...(4): Xaa = Gly or Ala
  VARIANT (5)...(5): Xaa = Ser or Ala
  VARIANT (10)...(10): Xaa = Met, Leu, Ile or an oxidatively stable Met-replacement amino acid
  VARIANT (14)...(14): Xaa = Leu or Lys
  VARIANT (16)...(16): Xaa = Asn, Lys or Ala
  VARIANT (17)...(17): Xaa = Leu or Lys
  VARIANT (19)...(19): Xaa = Ala or Thr
  VARIANT (20)...(20): Xaa = Arg, Lys, His or Ala
  VARIANT (21)...(21): Xaa = Asp or Lys
  VARIANT (27)...(27): Xaa = Ile or Leu
  VARIANT (28)...(28): Xaa = Gln or His
  VARIANT (33)...(33): Xaa = Arg, Lys or His
  VARIANT (34)...(34): Xaa = Arg, Lys or His with a COOH, CONH2 or a C-terminal blocking group
XXXXXFSDGXNTVXDXXAXXXFVQWLXXTKITXX

SEQ ID NO: 167 - protein, 33 aa, Artificial Sequence
  intestinotrophic analog of GLP-2
  VARIANT (1)...(1): Xaa = Arg, Lys or His, with an amino terminal group or an amino terminal blocking group
  VARIANT (2)...(2): Xaa = His or Tyr
  VARIANT (3)...(3): Xaa = is Ala, Gly, D-Ala, Pro, Ile, Nva (Norvaline), alpha -aminobutyric acid, or an Ala-replacement amino acid conferring on said analog resistance to DPP-IV enzyme
  VARIANT (4)...(4): Xaa = Asp, Glu, Pro or Hpro (hydroxyproline); or Xaa-Xaa in positions 3 and 4 taken together are Xaa(psi)(CH(OH)CH2)Xaa; Xaa(psi)(CH2NH2)Xaa or Xaa(psi)(CHCH)Xaa
  VARIANT (5)...(5): Xaa = Gly or Ala
  VARIANT (6)...(6): Xaa = Ser or Ala
  VARIANT (11)...(11): Xaa = Met, Leu, Ile or an oxidatively stable Met-replacement amino acid
  VARIANT (15)...(15): Xaa = Leu or Lys
  VARIANT (17)...(17): Xaa = Asn, Lys or Ala
  VARIANT (18)...(18): Xaa = Leu or Lys
  VARIANT (20)...(20): Xaa = Ala or Thr
  VARIANT (21)...(21): Xaa = Arg, Lys, His or Ala
  VARIANT (22)...(22): Xaa = Asp or Lys
  VARIANT (28)...(28): Xaa = Ile or Leu
  VARIANT (29)...(29): Xaa = Gln or His
XXXXXXFSDGXNTVXDXXAXXXFVQWLXXTKIT

SEQ ID NO: 168 - protein, 34 aa, Artificial Sequence
  intestinotrophic analog of GLP-2
  VARIANT (1)...(1): Xaa = Arg, Lys or His, with an amino terminal group or an amino terminal blocking group
  VARIANT (2)...(2): Xaa = His or Tyr
  VARIANT (3)...(3): Xaa = is Ala, Gly, D-Ala, Pro, Ile, Nva (Norvaline), alpha -aminobutyric acid, or an Ala-replacement amino acid conferring on said analog resistance to DPP-IV enzyme
  VARIANT (4)...(4): Xaa = Asp, Glu, Pro or Hpro (hydroxyproline); or Xaa-Xaa in positions 3 and 4 taken together are Xaa(psi)(CH(OH)CH2)Xaa; Xaa(psi)(CH2NH2)Xaa or Xaa(psi)(CHCH)Xaa
  VARIANT (5)...(5): Xaa = Gly or Ala
  VARIANT (6)...(6): Xaa = Ser or Ala
  VARIANT (11)...(11): Xaa = Met, Leu, Ile or an oxidatively stable Met-replacement amino acid
  VARIANT (15)...(15): Xaa = Leu or Lys
  VARIANT (17)...(17): Xaa = Asn, Lys or Ala
  VARIANT (18)...(18): Xaa = Leu or Lys
  VARIANT (20)...(20): Xaa = Ala or Thr
  VARIANT (21)...(21): Xaa = Arg, Lys, His or Ala
  VARIANT (22)...(22): Xaa = Asp or Lys
  VARIANT (28)...(28): Xaa = Ile or Leu
  VARIANT (29)...(29): Xaa = Gln or His
  VARIANT (34)...(34): Xaa = Arg, Lys or His with a COOH, CONH2 or a C-terminal blocking group
XXXXXXFSDGXNTVXDXXAXXXFVQWLXXTKITX

SEQ ID NO: 169 - protein, 35 aa, Artificial Sequence
  intestinotrophic analog of GLP-2
  VARIANT (1)...(1): Xaa = Arg, Lys or His, with an amino terminal group or an amino terminal blocking group
  VARIANT (2)...(2): Xaa = His or Tyr
  VARIANT (3)...(3): Xaa = is Ala, Gly, D-Ala, Pro, Ile, Nva (Norvaline), alpha -aminobutyric acid, or an Ala-replacement amino acid conferring on said analog resistance to DPP-IV enzyme
  VARIANT (4)...(4): Xaa = Asp, Glu, Pro or Hpro (hydroxyproline); or Xaa-Xaa in positions 3 and 4 taken together are Xaa(psi)(CH(OH)CH2)Xaa; Xaa(psi)(CH2NH2)Xaa or Xaa(psi)(CHCH)Xaa
  VARIANT (5)...(5): Xaa = Gly or Ala
  VARIANT (6)...(6): Xaa = Ser or Ala
  VARIANT (11)...(11): Xaa = Met, Leu, Ile or an oxidatively stable Met-replacement amino acid
  VARIANT (15)...(15): Xaa = Leu or Lys
  VARIANT (17)...(17): Xaa = Asn, Lys or Ala
  VARIANT (18)...(18): Xaa = Leu or Lys
  VARIANT (20)...(20): Xaa = Ala or Thr
  VARIANT (21)...(21): Xaa = Arg, Lys, His or Ala
  VARIANT (22)...(22): Xaa = Asp or Lys
  VARIANT (28)...(28): Xaa = Ile or Leu
  VARIANT (29)...(29): Xaa = Gln or His
  VARIANT (34)...(34): Xaa = Arg, Lys or His
  VARIANT (35)...(35): Xaa = Arg, Lys or His with a COOH, CONH2 or a C-terminal blocking group
XXXXXXFSDGXNTVXDXXAXXXFVQWLXXTKITXX

SEQ ID NO: 170 - protein, 34 aa, Artificial Sequence
  intestinotrophic analog of GLP-2
  VARIANT (1)...(1): Xaa = Arg, Lys or His, with an amino terminal group or an amino terminal blocking group
  VARIANT (2)...(2): Xaa = Arg, Lys or His
  VARIANT (3)...(3): Xaa = His or Tyr
  VARIANT (4)...(4): Xaa = is Ala, Gly, D-Ala, Pro, Ile, Nva (Norvaline), alpha -aminobutyric acid, or an Ala-replacement amino acid conferring on said analog resistance to DPP-IV enzyme
  VARIANT (5)...(5): Xaa = Asp, Glu, Pro or Hpro (hydroxyproline); or Xaa-Xaa in positions 4 and 5 taken together are Xaa(psi)(CH(OH)CH2)Xaa; Xaa(psi)(CH2NH2)Xaa or Xaa(psi)(CHCH)Xaa
  VARIANT (6)...(6): Xaa = Gly or Ala
  VARIANT (7)...(7): Xaa = Ser or Ala
  VARIANT (12)...(12): Xaa = Met, Leu, Ile or an oxidatively stable Met-replacement amino acid
  VARIANT (16)...(16): Xaa = Leu or Lys
  VARIANT (18)...(18): Xaa = Asn, Lys or Ala
  VARIANT (19)...(19): Xaa = Leu or Lys
  VARIANT (21)...(21): Xaa = Ala or Thr
  VARIANT (22)...(22): Xaa = Arg, Lys, His or Ala
  VARIANT (23)...(23): Xaa = Asp or Lys
  VARIANT (29)...(29): Xaa = Ile or Leu
  VARIANT (30)...(30): Xaa = Gln or His
XXXXXXXFSDGXNTVXDXXAXXXFVQWLXXTKIT

SEQ ID NO: 171 - protein, 35 aa, Artificial Sequence
  intestinotrophic analog of GLP-2
  VARIANT (1)...(1): Xaa = Arg, Lys or His, with an amino terminal group or an amino terminal blocking group
  VARIANT (2)...(2): Xaa = Arg, Lys or His
  VARIANT (3)...(3): Xaa = His or Tyr
  VARIANT (4)...(4): Xaa = is Ala, Gly, D-Ala, Pro, Ile, Nva (Norvaline), alpha -aminobutyric acid, or an Ala-replacement amino acid conferring on said analog resistance to DPP-IV enzyme
  VARIANT (5)...(5): Xaa = Asp, Glu, Pro or Hpro (hydroxyproline); or Xaa-Xaa in positions 4 and 5 taken together are Xaa(psi)(CH(OH)CH2)Xaa; Xaa(psi)(CH2NH2)Xaa or Xaa(psi)(CHCH)Xaa
  VARIANT (6)...(6): Xaa = Gly or Ala
  VARIANT (7)...(7): Xaa = Ser or Ala
  VARIANT (12)...(12): Xaa = Met, Leu, Ile or an oxidatively stable Met-replacement amino acid
  VARIANT (16)...(16): Xaa = Leu or Lys
  VARIANT (18)...(18): Xaa = Asn, Lys or Ala
  VARIANT (19)...(19): Xaa = Leu or Lys
  VARIANT (21)...(21): Xaa = Ala or Thr
  VARIANT (22)...(22): Xaa = Arg, Lys, His or Ala
  VARIANT (23)...(23): Xaa = Asp or Lys
  VARIANT (29)...(29): Xaa = Ile or Leu
  VARIANT (30)...(30): Xaa = Gln or His
  VARIANT (35)...(35): Xaa = Arg, Lys or His with a COOH, CONH2 or a C-terminal blocking group
XXXXXXXFSDGXNTVXDXXAXXXFVQWLXXTKITX

SEQ ID NO: 172 - protein, 36 aa, Artificial Sequence
  intestinotrophic analog of GLP-2
  VARIANT (1)...(1): Xaa = Arg, Lys or His, with an amino terminal group or an amino terminal blocking group
  VARIANT (2)...(2): Xaa = Arg, Lys or His
  VARIANT (3)...(3): Xaa = His or Tyr
  VARIANT (4)...(4): Xaa = is Ala, Gly, D-Ala, Pro, Ile, Nva (Norvaline), alpha -aminobutyric acid, or an Ala-replacement amino acid conferring on said analog resistance to DPP-IV enzyme
  VARIANT (5)...(5): Xaa = Asp, Glu, Pro or Hpro (hydroxyproline); or Xaa-Xaa in positions 4 and 5 taken together are Xaa(psi)(CH(OH)CH2)Xaa; Xaa(psi)(CH2NH2)Xaa or Xaa(psi)(CHCH)Xaa
  VARIANT (6)...(6): Xaa = Gly or Ala
  VARIANT (7)...(7): Xaa = Ser or Ala
  VARIANT (12)...(12): Xaa = Met, Leu, Ile or an oxidatively stable Met-replacement amino acid
  VARIANT (16)...(16): Xaa = Leu or Lys
  VARIANT (18)...(18): Xaa = Asn, Lys or Ala
  VARIANT (19)...(19): Xaa = Leu or Lys
  VARIANT (21)...(21): Xaa = Ala or Thr
  VARIANT (22)...(22): Xaa = Arg, Lys, His or Ala
  VARIANT (23)...(23): Xaa = Asp or Lys
  VARIANT (29)...(29): Xaa = Ile or Leu
  VARIANT (30)...(30): Xaa = Gln or His
  VARIANT (35)...(35): Xaa = Arg, Lys or His
  VARIANT (36)...(36): Xaa = Arg, Lys or His with a COOH, CONH2 or a C-terminal blocking group
XXXXXXXFSDGXNTVXDXXAXXXFVQWLXXTKITXX

SEQ ID NO: 173 - protein, 31 aa, Artificial Sequence
  intestinotrophic analog of GLP-2
  VARIANT (1)...(1): Xaa = His or Tyr, with an amino terminal group or an amino terminal blocking group
  VARIANT (2)...(2): Xaa = is Ala, Gly, D-Ala, Pro, Ile, Nva (Norvaline), alpha -aminobutyric acid, or an Ala-replacement amino acid conferring on said analog resistance to DPP-IV enzyme
  VARIANT (3)...(3): Xaa = Asp, Glu, Pro or Hpro (hydroxyproline); or Xaa-Xaa in positions 2 and 3 taken together are Xaa(psi)(CH(OH)CH2)Xaa; Xaa(psi)(CH2NH2)Xaa or Xaa(psi)(CHCH)Xaa
  VARIANT (4)...(4): Xaa = Gly or Ala
  VARIANT (5)...(5): Xaa = Ser or Ala
  VARIANT (13)...(13): Xaa = Leu or Lys
  VARIANT (15)...(15): Xaa = Asn, Lys or Ala
  VARIANT (16)...(16): Xaa = Leu or Lys
  VARIANT (18)...(18): Xaa = Ala or Thr
  VARIANT (19)...(19): Xaa = Arg, Lys, His or Ala
  VARIANT (20)...(20): Xaa = Asp or Lys
  VARIANT (23)...(23): Xaa = Asn or Ala
  VARIANT (26)...(26): Xaa = Ile or Leu
  VARIANT (27)...(27): Xaa = Gln or His
XXXXXFSDYSKYXDXXAXXXFIXWLXXTKIT

SEQ ID NO: 174 - protein, 32 aa, Artificial Sequence
  intestinotrophic analog of GLP-2
  VARIANT (1)...(1): Xaa = His or Tyr, with an amino terminal group or an amino terminal blocking group
  VARIANT (2)...(2): Xaa = is Ala, Gly, D-Ala, Pro, Ile, Nva (Norvaline), alpha -aminobutyric acid, or an Ala-replacement amino acid conferring on said analog resistance to DPP-IV enzyme
  VARIANT (3)...(3): Xaa = Asp, Glu, Pro or Hpro (hydroxyproline); or Xaa-Xaa in positions 2 and 3 taken together are Xaa(psi)(CH(OH)CH2)Xaa; Xaa(psi)(CH2NH2)Xaa or Xaa(psi)(CHCH)Xaa
  VARIANT (4)...(4): Xaa = Gly or Ala
  VARIANT (5)...(5): Xaa = Ser or Ala
  VARIANT (13)...(13): Xaa = Leu or Lys
  VARIANT (15)...(15): Xaa = Asn, Lys or Ala
  VARIANT (16)...(16): Xaa = Leu or Lys
  VARIANT (18)...(18): Xaa = Ala or Thr
  VARIANT (19)...(19): Xaa = Arg, Lys, His or Ala
  VARIANT (20)...(20): Xaa = Asp or Lys
  VARIANT (23)...(23): Xaa = Asn or Ala
  VARIANT (26)...(26): Xaa = Ile or Leu
  VARIANT (27)...(27): Xaa = Gln or His
  VARIANT (32)...(32): Xaa = Arg, Lys or His with a COOH, CONH2 or a C-terminal blocking group
XXXXXFSDYSKYXDXXAXXXFIXWLXXTKITX

SEQ ID NO: 175 - protein, 33 aa, Artificial Sequence
  intestinotrophic analog of GLP-2
  VARIANT (1)...(1): Xaa = His or Tyr, with an amino terminal group or an amino terminal blocking group
  VARIANT (2)...(2): Xaa = is Ala, Gly, D-Ala, Pro, Ile, Nva (Norvaline), alpha -aminobutyric acid, or an Ala-replacement amino acid conferring on said analog resistance to DPP-IV enzyme
  VARIANT (3)...(3): Xaa = Asp, Glu, Pro or Hpro (hydroxyproline); or Xaa-Xaa in positions 2 and 3 taken together are Xaa(psi)(CH(OH)CH2)Xaa; Xaa(psi)(CH2NH2)Xaa or Xaa(psi)(CHCH)Xaa
  VARIANT (4)...(4): Xaa = Gly or Ala
  VARIANT (5)...(5): Xaa = Ser or Ala
  VARIANT (13)...(13): Xaa = Leu or Lys
  VARIANT (15)...(15): Xaa = Asn, Lys or Ala
  VARIANT (16)...(16): Xaa = Leu or Lys
  VARIANT (18)...(18): Xaa = Ala or Thr
  VARIANT (19)...(19): Xaa = Arg, Lys, His or Ala
  VARIANT (20)...(20): Xaa = Asp or Lys
  VARIANT (23)...(23): Xaa = Asn or Ala
  VARIANT (26)...(26): Xaa = Ile or Leu
  VARIANT (27)...(27): Xaa = Gln or His
  VARIANT (32)...(32): Xaa = Arg, Lys or His
  VARIANT (33)...(33): Xaa = Arg, Lys or His with a COOH, CONH2 or a C-terminal blocking group
XXXXXFSDYSKYXDXXAXXXFIXWLXXTKITXX

SEQ ID NO: 176 - protein, 32 aa, Artificial Sequence
  intestinotrophic analog of GLP-2
  VARIANT (1)...(1): Xaa = Arg, Lys or His, with an amino terminal group or an amino terminal blocking group
  VARIANT (2)...(2): Xaa = His or Tyr
  VARIANT (3)...(3): Xaa = is Ala, Gly, D-Ala, Pro, Ile, Nva (Norvaline), alpha -aminobutyric acid, or an Ala-replacement amino acid conferring on said analog resistance to DPP-IV enzyme
  VARIANT (4)...(4): Xaa = Asp, Glu, Pro or Hpro (hydroxyproline); or Xaa-Xaa in positions 3 and 4 taken together are Xaa(psi)(CH(OH)CH2)Xaa; Xaa(psi)(CH2NH2)Xaa or Xaa(psi)(CHCH)Xaa
  VARIANT (5)...(5): Xaa = Gly or Ala
  VARIANT (6)...(6): Xaa = Ser or Ala
  VARIANT (14)...(14): Xaa = Leu or Lys
  VARIANT (16)...(16): Xaa = Asn, Lys or Ala
  VARIANT (17)...(17): Xaa = Leu or Lys
  VARIANT (19)...(19): Xaa = Ala or Thr
  VARIANT (20)...(20): Xaa = Arg, Lys, His or Ala
  VARIANT (21)...(21): Xaa = Asp or Lys
  VARIANT (24)...(24): Xaa = Asn or Ala
  VARIANT (27)...(27): Xaa = Ile or Leu
  VARIANT (28)...(28): Xaa = Gln or His
XXXXXXFSDYSKYXDXXAXXXFIXWLXXTKIT

SEQ ID NO: 177 - protein, 33 aa, Artificial Sequence
  intestinotrophic analog of GLP-2
  VARIANT (1)...(1): Xaa = Arg, Lys or His, with an amino terminal group or an amino terminal blocking group
  VARIANT (2)...(2): Xaa = His or Tyr
  VARIANT (3)...(3): Xaa = is Ala, Gly, D-Ala, Pro, Ile, Nva (Norvaline), alpha -aminobutyric acid, or an Ala-replacement amino acid conferring on said analog resistance to DPP-IV enzyme
  VARIANT (4)...(4): Xaa = Asp, Glu, Pro or Hpro (hydroxyproline); or Xaa-Xaa in positions 3 and 4 taken together are Xaa(psi)(CH(OH)CH2)Xaa; Xaa(psi)(CH2NH2)Xaa or Xaa(psi)(CHCH)Xaa
  VARIANT (5)...(5): Xaa = Gly or Ala
  VARIANT (6)...(6): Xaa = Ser or Ala
  VARIANT (14)...(14): Xaa = Leu or Lys
  VARIANT (16)...(16): Xaa = Asn, Lys or Ala
  VARIANT (17)...(17): Xaa = Leu or Lys
  VARIANT (19)...(19): Xaa = Ala or Thr
  VARIANT (20)...(20): Xaa = Arg, Lys, His or Ala
  VARIANT (21)...(21): Xaa = Asp or Lys
  VARIANT (24)...(24): Xaa = Asn or Ala
  VARIANT (27)...(27): Xaa = Ile or Leu
  VARIANT (28)...(28): Xaa = Gln or His
  VARIANT (33)...(33): Xaa = Arg, Lys or His with a COOH, CONH2 or a C-terminal blocking group
XXXXXXFSDYSKYXDXXAXXXFIXWLXXTKITX

SEQ ID NO: 178 - protein, 34 aa, Artificial Sequence
  intestinotrophic analog of GLP-2
  VARIANT (1)...(1): Xaa = Arg, Lys or His, with an amino terminal group or an amino terminal blocking group
  VARIANT (2)...(2): Xaa = His or Tyr
  VARIANT (3)...(3): Xaa = is Ala, Gly, D-Ala, Pro, Ile, Nva (Norvaline), alpha -aminobutyric acid, or an Ala-replacement amino acid conferring on said analog resistance to DPP-IV enzyme
  VARIANT (4)...(4): Xaa = Asp, Glu, Pro or Hpro (hydroxyproline); or Xaa-Xaa in positions 3 and 4 taken together are Xaa(psi)(CH(OH)CH2)Xaa; Xaa(psi)(CH2NH2)Xaa or Xaa(psi)(CHCH)Xaa
  VARIANT (5)...(5): Xaa = Gly or Ala
  VARIANT (6)...(6): Xaa = Ser or Ala
  VARIANT (14)...(14): Xaa = Leu or Lys
  VARIANT (16)...(16): Xaa = Asn, Lys or Ala
  VARIANT (17)...(17): Xaa = Leu or Lys
  VARIANT (19)...(19): Xaa = Ala or Thr
  VARIANT (20)...(20): Xaa = Arg, Lys, His or Ala
  VARIANT (21)...(21): Xaa = Asp or Lys
  VARIANT (24)...(24): Xaa = Asn or Ala
  VARIANT (27)...(27): Xaa = Ile or Leu
  VARIANT (28)...(28): Xaa = Gln or His
  VARIANT (33)...(33): Xaa = Arg, Lys or His
  VARIANT (34)...(34): Xaa = Arg, Lys or His with a COOH, CONH2 or a C-terminal blocking group
XXXXXXFSDYSKYXDXXAXXXFIXWLXXTKITXX

SEQ ID NO: 179 - protein, 33 aa, Artificial Sequence
  intestinotrophic analog of GLP-2
  VARIANT (1)...(1): Xaa = Arg, Lys or His, with an amino terminal group or an amino terminal blocking group
  VARIANT (2)...(2): Xaa = Arg, Lys or His
  VARIANT (3)...(3): Xaa = His or Tyr
  VARIANT (4)...(4): Xaa = is Ala, Gly, D-Ala, Pro, Ile, Nva (Norvaline), alpha -aminobutyric acid, or an Ala-replacement amino acid conferring on said analog resistance to DPP-IV enzyme
  VARIANT (5)...(5): Xaa = Asp, Glu, Pro or Hpro (hydroxyproline); or Xaa-Xaa in positions 4 and 5 taken together are Xaa(psi)(CH(OH)CH2)Xaa; Xaa(psi)(CH2NH2)Xaa or Xaa(psi)(CHCH)Xaa
  VARIANT (6)...(6): Xaa = Gly or Ala
  VARIANT (7)...(7): Xaa = Ser or Ala
  VARIANT (15)...(15): Xaa = Leu or Lys
  VARIANT (17)...(17): Xaa = Asn, Lys or Ala
  VARIANT (18)...(18): Xaa = Leu or Lys
  VARIANT (20)...(20): Xaa = Ala or Thr
  VARIANT (21)...(21): Xaa = Arg, Lys, His or Ala
  VARIANT (22)...(22): Xaa = Asp or Lys
  VARIANT (25)...(25): Xaa = Asn or Ala
  VARIANT (28)...(28): Xaa = Ile or Leu
  VARIANT (29)...(29): Xaa = Gln or His
XXXXXXXFSDYSKYXDXXAXXXFIXWLXXTKIT

SEQ ID NO: 180 - protein, 34 aa, Artificial Sequence
  intestinotrophic analog of GLP-2
  VARIANT (1)...(1): Xaa = Arg, Lys or His, with an amino terminal group or an amino terminal blocking group
  VARIANT (2)...(2): Xaa = Arg, Lys or His
  VARIANT (3)...(3): Xaa = His or Tyr
  VARIANT (4)...(4): Xaa = is Ala, Gly, D-Ala, Pro, Ile, Nva (Norvaline), alpha -aminobutyric acid, or an Ala-replacement amino acid conferring on said analog resistance to DPP-IV enzyme
  VARIANT (5)...(5): Xaa = Asp, Glu, Pro or Hpro (hydroxyproline); or Xaa-Xaa in positions 4 and 5 taken together are Xaa(psi)(CH(OH)CH2)Xaa; Xaa(psi)(CH2NH2)Xaa or Xaa(psi)(CHCH)Xaa
  VARIANT (6)...(6): Xaa = Gly or Ala
  VARIANT (7)...(7): Xaa = Ser or Ala
  VARIANT (15)...(15): Xaa = Leu or Lys
  VARIANT (17)...(17): Xaa = Asn, Lys or Ala
  VARIANT (18)...(18): Xaa = Leu or Lys
  VARIANT (20)...(20): Xaa = Ala or Thr
  VARIANT (21)...(21): Xaa = Arg, Lys, His or Ala
  VARIANT (22)...(22): Xaa = Asp or Lys
  VARIANT (25)...(25): Xaa = Asn or Ala
  VARIANT (28)...(28): Xaa = Ile or Leu
  VARIANT (29)...(29): Xaa = Gln or His
  VARIANT (34)...(34): Xaa = Arg, Lys or His with a COOH, CONH2 or a C-terminal blocking group
XXXXXXXFSDYSKYXDXXAXXXFIXWLXXTKITX

SEQ ID NO: 181 - protein, 35 aa, Artificial Sequence
  intestinotrophic analog of GLP-2
  VARIANT (1)...(1): Xaa = Arg, Lys or His, with an amino terminal group or an amino terminal blocking group
  VARIANT (2)...(2): Xaa = Arg, Lys or His
  VARIANT (3)...(3): Xaa = His or Tyr
  VARIANT (4)...(4): Xaa = is Ala, Gly, D-Ala, Pro, Ile, Nva (Norvaline), alpha -aminobutyric acid, or an Ala-replacement amino acid conferring on said analog resistance to DPP-IV enzyme
  VARIANT (5)...(5): Xaa = Asp, Glu, Pro or Hpro (hydroxyproline); or Xaa-Xaa in positions 4 and 5 taken together are Xaa(psi)(CH(OH)CH2)Xaa; Xaa(psi)(CH2NH2)Xaa or Xaa(psi)(CHCH)Xaa
  VARIANT (6)...(6): Xaa = Gly or Ala
  VARIANT (7)...(7): Xaa = Ser or Ala
  VARIANT (15)...(15): Xaa = Leu or Lys
  VARIANT (17)...(17): Xaa = Asn, Lys or Ala
  VARIANT (18)...(18): Xaa = Leu or Lys
  VARIANT (20)...(20): Xaa = Ala or Thr
  VARIANT (21)...(21): Xaa = Arg, Lys, His or Ala
  VARIANT (22)...(22): Xaa = Asp or Lys
  VARIANT (25)...(25): Xaa = Asn or Ala
  VARIANT (28)...(28): Xaa = Ile or Leu
  VARIANT (29)...(29): Xaa = Gln or His
  VARIANT (34)...(34): Xaa = Arg, Lys or His
  VARIANT (35)...(35): Xaa = Arg, Lys or His with a COOH, CONH2 or a C-terminal blocking group
XXXXXXXFSDYSKYXDXXAXXXFIXWLXXTKITXX

SEQ ID NO: 182 - protein, 31 aa, Artificial Sequence
  intestinotrophic analog of GLP-2
  VARIANT (1)...(1): Xaa = His or Tyr, with an amino terminal group or an amino terminal blocking group
  VARIANT (2)...(2): Xaa = is Ala, Gly, D-Ala, Pro, Ile, Nva (Norvaline), alpha -aminobutyric acid, or an Ala-replacement amino acid conferring on said analog resistance to DPP-IV enzyme
  VARIANT (3)...(3): Xaa = Asp, Glu, Pro or Hpro (hydroxyproline); or Xaa-Xaa in positions 2 and 3 taken together are Xaa(psi)(CH(OH)CH2)Xaa; Xaa(psi)(CH2NH2)Xaa or Xaa(psi)(CHCH)Xaa
  VARIANT (4)...(4): Xaa = Gly or Ala
  VARIANT (5)...(5): Xaa = Ser or Ala
  VARIANT (13)...(13): Xaa = Leu or Lys
  VARIANT (15)...(15): Xaa = Asn, Lys or Ala
  VARIANT (16)...(16): Xaa = Leu or Lys
  VARIANT (18)...(18): Xaa = Ala or Thr
  VARIANT (19)...(19): Xaa = Arg, Lys, His or Ala
  VARIANT (20)...(20): Xaa = Asp or Lys
  VARIANT (26)...(26): Xaa = Ile or Leu
  VARIANT (27)...(27): Xaa = Gln or His
XXXXXFSDYSKYXDXXAXXXFVQWLXXTKIT

SEQ ID NO: 183 - protein, 32 aa, Artificial Sequence; identical to SEQ ID NO: 2
  intestinotrophic analog of GLP-2
  VARIANT (1)...(1): Xaa = His or Tyr, with an amino terminal group or an amino terminal blocking group
  VARIANT (2)...(2): Xaa = is Ala, Gly, D-Ala, Pro, Ile, Nva (Norvaline), alpha -aminobutyric acid, or an Ala-replacement amino acid conferring on said analog resistance to DPP-IV enzyme
  VARIANT (3)...(3): Xaa = Asp, Glu, Pro or Hpro (hydroxyproline); or Xaa-Xaa in positions 2 and 3 taken together are Xaa(psi)(CH(OH)CH2)Xaa; Xaa(psi)(CH2NH2)Xaa or Xaa(psi)(CHCH)Xaa
  VARIANT (4)...(4): Xaa = Gly or Ala
  VARIANT (5)...(5): Xaa = Ser or Ala
  VARIANT (13)...(13): Xaa = Leu or Lys
  VARIANT (15)...(15): Xaa = Asn, Lys or Ala
  VARIANT (16)...(16): Xaa = Leu or Lys
  VARIANT (18)...(18): Xaa = Ala or Thr
  VARIANT (19)...(19): Xaa = Arg, Lys, His or Ala
  VARIANT (20)...(20): Xaa = Asp or Lys
  VARIANT (26)...(26): Xaa = Ile or Leu
  VARIANT (27)...(27): Xaa = Gln or His
  VARIANT (32)...(32): Xaa = Arg, Lys or His with a COOH, CONH2 or a C-terminal blocking group

SEQ ID NO: 184 - protein, 33 aa, Artificial Sequence
  intestinotrophic analog of GLP-2
  VARIANT (1)...(1): Xaa = His or Tyr, with an amino terminal group or an amino terminal blocking group
  VARIANT (2)...(2): Xaa = is Ala, Gly, D-Ala, Pro, Ile, Nva (Norvaline), alpha -aminobutyric acid, or an Ala-replacement amino acid conferring on said analog resistance to DPP-IV enzyme
  VARIANT (3)...(3): Xaa = Asp, Glu, Pro or Hpro (hydroxyproline); or Xaa-Xaa in positions 2 and 3 taken together are Xaa(psi)(CH(OH)CH2)Xaa; Xaa(psi)(CH2NH2)Xaa or Xaa(psi)(CHCH)Xaa
  VARIANT (4)...(4): Xaa = Gly or Ala
  VARIANT (5)...(5): Xaa = Ser or Ala
  VARIANT (13)...(13): Xaa = Leu or Lys
  VARIANT (15)...(15): Xaa = Asn, Lys or Ala
  VARIANT (16)...(16): Xaa = Leu or Lys
  VARIANT (18)...(18): Xaa = Ala or Thr
  VARIANT (19)...(19): Xaa = Arg, Lys, His or Ala
  VARIANT (20)...(20): Xaa = Asp or Lys
  VARIANT (26)...(26): Xaa = Ile or Leu
  VARIANT (27)...(27): Xaa = Gln or His
  VARIANT (32)...(32): Xaa = Arg, Lys or His
  VARIANT (33)...(33): Xaa = Arg, Lys or His with a COOH, CONH2 or a C-terminal blocking group
XXXXXFSDYSKYXDXXAXXXFVQWLXXTKITXX

SEQ ID NO: 185 - protein, 32 aa, Artificial Sequence
  intestinotrophic analog of GLP-2
  VARIANT (1)...(1): Xaa = Arg, Lys or His, with an amino terminal group or an amino terminal blocking group
  VARIANT (2)...(2): Xaa = His or Tyr
  VARIANT (3)...(3): Xaa = is Ala, Gly, D-Ala, Pro, Ile, Nva (Norvaline), alpha -aminobutyric acid, or an Ala-replacement amino acid conferring on said analog resistance to DPP-IV enzyme
  VARIANT (4)...(4): Xaa = Asp, Glu, Pro or Hpro (hydroxyproline); or Xaa-Xaa in positions 3 and 4 taken together are Xaa(psi)(CH(OH)CH2)Xaa; Xaa(psi)(CH2NH2)Xaa or Xaa(psi)(CHCH)Xaa
  VARIANT (5)...(5): Xaa = Gly or Ala
  VARIANT (6)...(6): Xaa = Ser or Ala
  VARIANT (14)...(14): Xaa = Leu or Lys
  VARIANT (16)...(16): Xaa = Asn, Lys or Ala
  VARIANT (17)...(17): Xaa = Leu or Lys
  VARIANT (19)...(19): Xaa = Ala or Thr
  VARIANT (20)...(20): Xaa = Arg, Lys, His or Ala
  VARIANT (21)...(21): Xaa = Asp or Lys
  VARIANT (27)...(27): Xaa = Ile or Leu
  VARIANT (28)...(28): Xaa = Gln or His
XXXXXXFSDYSKYXDXXAXXXFVQWLXXTKIT

SEQ ID NO: 186 - protein, 33 aa, Artificial Sequence
  intestinotrophic analog of GLP-2
  VARIANT (1)...(1): Xaa = Arg, Lys or His, with an amino terminal group or an amino terminal blocking group
  VARIANT (2)...(2): Xaa = His or Tyr
  VARIANT (3)...(3): Xaa = is Ala, Gly, D-Ala, Pro, Ile, Nva (Norvaline), alpha -aminobutyric acid, or an Ala-replacement amino acid conferring on said analog resistance to DPP-IV enzyme
  VARIANT (4)...(4): Xaa = Asp, Glu, Pro or Hpro (hydroxyproline); or Xaa-Xaa in positions 3 and 4 taken together are Xaa(psi)(CH(OH)CH2)Xaa; Xaa(psi)(CH2NH2)Xaa or Xaa(psi)(CHCH)Xaa
  VARIANT (5)...(5): Xaa = Gly or Ala
  VARIANT (6)...(6): Xaa = Ser or Ala
  VARIANT (14)...(14): Xaa = Leu or Lys
  VARIANT (16)...(16): Xaa = Asn, Lys or Ala
  VARIANT (17)...(17): Xaa = Leu or Lys
  VARIANT (19)...(19): Xaa = Ala or Thr
  VARIANT (20)...(20): Xaa = Arg, Lys, His or Ala
  VARIANT (21)...(21): Xaa = Asp or Lys
  VARIANT (27)...(27): Xaa = Ile or Leu
  VARIANT (28)...(28): Xaa = Gln or His
  VARIANT (33)...(33): Xaa = Arg, Lys or His with a COOH, CONH2 or a C-terminal blocking group
XXXXXXFSDYSKYXDXXAXXXFVQWLXXTKITX

SEQ ID NO: 187 - protein, 34 aa, Artificial Sequence
  intestinotrophic analog of GLP-2
  VARIANT (1)...(1): Xaa = Arg, Lys or His, with an amino terminal group or an amino terminal blocking group
  VARIANT (2)...(2): Xaa = His or Tyr
  VARIANT (3)...(3): Xaa = is Ala, Gly, D-Ala, Pro, Ile, Nva (Norvaline), alpha -aminobutyric acid, or an Ala-replacement amino acid conferring on said analog resistance to DPP-IV enzyme
  VARIANT (4)...(4): Xaa = Asp, Glu, Pro or Hpro (hydroxyproline); or Xaa-Xaa in positions 3 and 4 taken together are Xaa(psi)(CH(OH)CH2)Xaa; Xaa(psi)(CH2NH2)Xaa or Xaa(psi)(CHCH)Xaa
  VARIANT (5)...(5): Xaa = Gly or Ala
  VARIANT (6)...(6): Xaa = Ser or Ala
  VARIANT (14)...(14): Xaa = Leu or Lys
  VARIANT (16)...(16): Xaa = Asn, Lys or Ala
  VARIANT (17)...(17): Xaa = Leu or Lys
  VARIANT (19)...(19): Xaa = Ala or Thr
  VARIANT (20)...(20): Xaa = Arg, Lys, His or Ala
  VARIANT (21)...(21): Xaa = Asp or Lys
  VARIANT (27)...(27): Xaa = Ile or Leu
  VARIANT (28)...(28): Xaa = Gln or His
  VARIANT (33)...(33): Xaa = Arg, Lys or His
  VARIANT (34)...(34): Xaa = Arg, Lys or His with a COOH, CONH2 or a C-terminal blocking group
XXXXXXFSDYSKYXDXXAXXXFVQWLXXTKITXX

SEQ ID NO: 188 - protein, 33 aa, Artificial Sequence
  intestinotrophic analog of GLP-2
  VARIANT (1)...(1): Xaa = Arg, Lys or His, with an amino terminal group or an amino terminal blocking group
  VARIANT (2)...(2): Xaa = Arg, Lys or His
  VARIANT (3)...(3): Xaa = His or Tyr
  VARIANT (4)...(4): Xaa = is Ala, Gly, D-Ala, Pro, Ile, Nva (Norvaline), alpha -aminobutyric acid, or an Ala-replacement amino acid conferring on said analog resistance to DPP-IV enzyme
  VARIANT (5)...(5): Xaa = Asp, Glu, Pro or Hpro (hydroxyproline); or Xaa-Xaa in positions 4 and 5 taken together are Xaa(psi)(CH(OH)CH2)Xaa; Xaa(psi)(CH2NH2)Xaa or Xaa(psi)(CHCH)Xaa
  VARIANT (6)...(6): Xaa = Gly or Ala
  VARIANT (7)...(7): Xaa = Ser or Ala
  VARIANT (15)...(15): Xaa = Leu or Lys
  VARIANT (17)...(17): Xaa = Asn, Lys or Ala
  VARIANT (18)...(18): Xaa = Leu or Lys
  VARIANT (20)...(20): Xaa = Ala or Thr
  VARIANT (21)...(21): Xaa = Arg, Lys, His or Ala
  VARIANT (22)...(22): Xaa = Asp or Lys
  VARIANT (28)...(28): Xaa = Ile or Leu
  VARIANT (29)...(29): Xaa = Gln or His
XXXXXXXFSDYSKYXDXXAXXXFVQWLXXTKIT

SEQ ID NO: 189 - protein, 34 aa, Artificial Sequence
  intestinotrophic analog of GLP-2
  VARIANT (1)...(1): Xaa = Arg, Lys or His, with an amino terminal group or an amino terminal blocking group
  VARIANT (2)...(2): Xaa = Arg, Lys or His
  VARIANT (3)...(3): Xaa = His or Tyr
  VARIANT (4)...(4): Xaa = is Ala, Gly, D-Ala, Pro, Ile, Nva (Norvaline), alpha -aminobutyric acid, or an Ala-replacement amino acid conferring on said analog resistance to DPP-IV enzyme
  VARIANT (5)...(5): Xaa = Asp, Glu, Pro or Hpro (hydroxyproline); or Xaa-Xaa in positions 4 and 5 taken together are Xaa(psi)(CH(OH)CH2)Xaa; Xaa(psi)(CH2NH2)Xaa or Xaa(psi)(CHCH)Xaa
  VARIANT (6)...(6): Xaa = Gly or Ala
  VARIANT (7)...(7): Xaa = Ser or Ala
  VARIANT (15)...(15): Xaa = Leu or Lys
  VARIANT (17)...(17): Xaa = Asn, Lys or Ala
  VARIANT (18)...(18): Xaa = Leu or Lys
  VARIANT (20)...(20): Xaa = Ala or Thr
  VARIANT (21)...(21): Xaa = Arg, Lys, His or Ala
  VARIANT (22)...(22): Xaa = Asp or Lys
  VARIANT (28)...(28): Xaa = Ile or Leu
  VARIANT (29)...(29): Xaa = Gln or His
  VARIANT (34)...(34): Xaa = Arg, Lys or His with a COOH, CONH2 or a C-terminal blocking group
XXXXXXXFSDYSKYXDXXAXXXFVQWLXXTKITX

SEQ ID NO: 190 - protein, 35 aa, Artificial Sequence
  intestinotrophic analog of GLP-2
  VARIANT (1)...(1): Xaa = Arg, Lys or His, with an amino terminal group or an amino terminal blocking group
  VARIANT (2)...(2): Xaa = Arg, Lys or His
  VARIANT (3)...(3): Xaa = His or Tyr
  VARIANT (4)...(4): Xaa = is Ala, Gly, D-Ala, Pro, Ile, Nva (Norvaline), alpha -aminobutyric acid, or an Ala-replacement amino acid conferring on said analog resistance to DPP-IV enzyme
  VARIANT (5)...(5): Xaa = Asp, Glu, Pro or Hpro (hydroxyproline); or Xaa-Xaa in positions 4 and 5 taken together are Xaa(psi)(CH(OH)CH2)Xaa; Xaa(psi)(CH2NH2)Xaa or Xaa(psi)(CHCH)Xaa
  VARIANT (6)...(6): Xaa = Gly or Ala
  VARIANT (7)...(7): Xaa = Ser or Ala
  VARIANT (15)...(15): Xaa = Leu or Lys
  VARIANT (17)...(17): Xaa = Asn, Lys or Ala
  VARIANT (18)...(18): Xaa = Leu or Lys
  VARIANT (20)...(20): Xaa = Ala or Thr
  VARIANT (21)...(21): Xaa = Arg, Lys, His or Ala
  VARIANT (22)...(22): Xaa = Asp or Lys
  VARIANT (28)...(28): Xaa = Ile or Leu
  VARIANT (29)...(29): Xaa = Gln or His
  VARIANT (34)...(34): Xaa = Arg, Lys or His
  VARIANT (35)...(35): Xaa = Arg, Lys or His with a COOH, CONH2 or a C-terminal blocking group
XXXXXXXFSDYSKYXDXXAXXXFVQWLXXTKITXX

SEQ ID NO: 191 - protein, 34 aa, Artificial Sequence
  intestinotrophic analog of GLP-2
  VARIANT (1)...(1): Xaa = His or Tyr, with an amino terminal group or an amino terminal blocking group
  VARIANT (2)...(2): Xaa = is Ala, Gly, D-Ala, Pro, Ile, Nva (Norvaline), alpha -aminobutyric acid, or an Ala-replacement amino acid conferring on said analog resistance to DPP-IV enzyme
  VARIANT (3)...(3): Xaa = Asp, Glu, Pro or Hpro (hydroxyproline); or Xaa-Xaa in positions 2 and 3 taken together are Xaa(psi)(CH(OH)CH2)Xaa; Xaa(psi)(CH2NH2)Xaa or Xaa(psi)(CHCH)Xaa
  VARIANT (4)...(4): Xaa = Gly or Ala
  VARIANT (5)...(5): Xaa = Ser or Ala
  VARIANT (10)...(10): Xaa = Met, Leu, Ile or an oxidatively stable Met-replacement amino acid
  VARIANT (14)...(14): Xaa = Leu or Lys
  VARIANT (16)...(16): Xaa = Asn, Lys or Ala
  VARIANT (17)...(17): Xaa = Leu or Lys
  VARIANT (19)...(19): Xaa = Ala or Thr
  VARIANT (20)...(20): Xaa = Arg, Lys, His or Ala
  VARIANT (21)...(21): Xaa = Asp or Lys
  VARIANT (25)...(25): Xaa = Asn or Ala
  VARIANT (28)...(28): Xaa = Ile or Leu
  VARIANT (29)...(29): Xaa = Gln or His
  VARIANT (34)...(34): Xaa = Asp or Asn, with a COOH, CONH2 or a C-terminal blocking group
XXXXXFSDEXNTIXDXXAXXXFIIXWLXXTKITX

SEQ ID NO: 192 - protein, 35 aa, Artificial Sequence
  intestinotrophic analog of GLP-2
  VARIANT (1)...(1): Xaa = His or Tyr, with an amino terminal group or an amino terminal blocking group
  VARIANT (2)...(2): Xaa = is Ala, Gly, D-Ala, Pro, Ile, Nva (Norvaline), alpha -aminobutyric acid, or an Ala-replacement amino acid conferring on said analog resistance to DPP-IV enzyme
  VARIANT (3)...(3): Xaa = Asp, Glu, Pro or Hpro (hydroxyproline); or Xaa-Xaa in positions 2 and 3 taken together are Xaa(psi)(CH(OH)CH2)Xaa; Xaa(psi)(CH2NH2)Xaa or Xaa(psi)(CHCH)Xaa
  VARIANT (4)...(4): Xaa = Gly or Ala
  VARIANT (5)...(5): Xaa = Ser or Ala
  VARIANT (10)...(10): Xaa = Met, Leu, Ile or an oxidatively stable Met-replacement amino acid
  VARIANT (14)...(14): Xaa = Leu or Lys
  VARIANT (16)...(16): Xaa = Asn, Lys or Ala
  VARIANT (17)...(17): Xaa = Leu or Lys
  VARIANT (19)...(19): Xaa = Ala or Thr
  VARIANT (20)...(20): Xaa = Arg, Lys, His or Ala
  VARIANT (21)...(21): Xaa = Asp or Lys
  VARIANT (25)...(25): Xaa = Asn or Ala
  VARIANT (28)...(28): Xaa = Ile or Leu
  VARIANT (29)...(29): Xaa = Gln or His
  VARIANT (34)...(34): Xaa = Asp or Asn
  VARIANT (35)...(35): Xaa = Arg, Lys or His with a COOH, CONH2 or a C-terminal blocking group
XXXXXFSDEXNTIXDXXAXXXFIIXWLXXTKITXX

SEQ ID NO: 193 - protein, 36 aa, Artificial Sequence
  intestinotrophic analog of GLP-2
  VARIANT (1)...(1): Xaa = His or Tyr, with an amino terminal group or an amino terminal blocking group
  VARIANT (2)...(2): Xaa = is Ala, Gly, D-Ala, Pro, Ile, Nva (Norvaline), alpha -aminobutyric acid, or an Ala-replacement amino acid conferring on said analog resistance to DPP-IV enzyme
  VARIANT (3)...(3): Xaa = Asp, Glu, Pro or Hpro (hydroxyproline); or Xaa-Xaa in positions 2 and 3 taken together are Xaa(psi)(CH(OH)CH2)Xaa; Xaa(psi)(CH2NH2)Xaa or Xaa(psi)(CHCH)Xaa
  VARIANT (4)...(4): Xaa = Gly or Ala
  VARIANT (5)...(5): Xaa = Ser or Ala
  VARIANT (10)...(10): Xaa = Met, Leu, Ile or an oxidatively stable Met-replacement amino acid
  VARIANT (14)...(14): Xaa = Leu or Lys
  VARIANT (16)...(16): Xaa = Asn, Lys or Ala
  VARIANT (17)...(17): Xaa = Leu or Lys
  VARIANT (19)...(19): Xaa = Ala or Thr
  VARIANT (20)...(20): Xaa = Arg, Lys, His or Ala
  VARIANT (21)...(21): Xaa = Asp or Lys
  VARIANT (25)...(25): Xaa = Asn or Ala
  VARIANT (28)...(28): Xaa = Ile or Leu
  VARIANT (29)...(29): Xaa = Gln or His
  VARIANT (34)...(34): Xaa = Asp or Asn
  VARIANT (35)...(35): Xaa = Arg, Lys or His
  VARIANT (36)...(36): Xaa = Arg, Lys or His with a COOH, CONH2 or a C-terminal blocking group
XXXXXFSDEXNTIXDXXAXXXFIIXWLXXTKITXXX

SEQ ID NO: 194 - protein, 35 aa, Artificial Sequence
  intestinotrophic analog of GLP-2
  VARIANT (1)...(1): Xaa = Arg, Lys or His, with an amino terminal group or an amino terminal blocking group
  VARIANT (2)...(2): Xaa = His or Tyr
  VARIANT (3)...(3): Xaa = is Ala, Gly, D-Ala, Pro, Ile, Nva (Norvaline), alpha -aminobutyric acid, or an Ala-replacement amino acid conferring on said analog resistance to DPP-IV enzyme
  VARIANT (4)...(4): Xaa = Asp, Glu, Pro or Hpro (hydroxyproline); or Xaa-Xaa in positions 3 and 4 taken together are Xaa(psi)(CH(OH)CH2)Xaa; Xaa(psi)(CH2NH2)Xaa or Xaa(psi)(CHCH)Xaa
  VARIANT (5)...(5): Xaa = Gly or Ala
  VARIANT (6)...(6): Xaa = Ser or Ala
  VARIANT (11)...(11): Xaa = Met, Leu, Ile or an oxidatively stable Met-replacement amino acid
  VARIANT (15)...(15): Xaa = Leu or Lys
  VARIANT (17)...(17): Xaa = Asn, Lys or Ala
  VARIANT (18)...(18): Xaa = Leu or Lys
  VARIANT (20)...(20): Xaa = Ala or Thr
  VARIANT (21)...(21): Xaa = Arg, Lys, His or Ala
  VARIANT (22)...(22): Xaa = Asp or Lys
  VARIANT (26)...(26): Xaa = Asn or Ala
  VARIANT (29)...(29): Xaa = Ile or Leu
  VARIANT (30)...(30): Xaa = Gln or His
  VARIANT (35)...(35): Xaa = Asp or Asn, with a COOH, CONH2 or a C-terminal blocking group
XXXXXXFSDEXNTIXDXXAXXXFIIXWLXXTKITX

SEQ ID NO: 195 - protein, 36 aa, Artificial Sequence
  intestinotrophic analog of GLP-2
  VARIANT (1)...(1): Xaa = Arg, Lys or His, with an amino terminal group or an amino terminal blocking group
  VARIANT (2)...(2): Xaa = His or Tyr
  VARIANT (3)...(3): Xaa = is Ala, Gly, D-Ala, Pro, Ile, Nva (Norvaline), alpha -aminobutyric acid, or an Ala-replacement amino acid conferring on said analog resistance to DPP-IV enzyme
  VARIANT (4)...(4): Xaa = Asp, Glu, Pro or Hpro (hydroxyproline); or Xaa-Xaa in positions 3 and 4 taken together are Xaa(psi)(CH(OH)CH2)Xaa; Xaa(psi)(CH2NH2)Xaa or Xaa(psi)(CHCH)Xaa
  VARIANT (5)...(5): Xaa = Gly or Ala
  VARIANT (6)...(6): Xaa = Ser or Ala
  VARIANT (11)...(11): Xaa = Met, Leu, Ile or an oxidatively stable Met-replacement amino acid
  VARIANT (15)...(15): Xaa = Leu or Lys
  VARIANT (17)...(17): Xaa = Asn, Lys or Ala
  VARIANT (18)...(18): Xaa = Leu or Lys
  VARIANT (20)...(20): Xaa = Ala or Thr
  VARIANT (21)...(21): Xaa = Arg, Lys, His or Ala
  VARIANT (22)...(22): Xaa = Asp or Lys
  VARIANT (26)...(26): Xaa = Asn or Ala
  VARIANT (29)...(29): Xaa = Ile or Leu
  VARIANT (30)...(30): Xaa = Gln or His
  VARIANT (35)...(35): Xaa = Asp or Asn
  VARIANT (36)...(36): Xaa = Arg, Lys or His with a COOH, CONH2 or a C-terminal blocking group
XXXXXXFSDEXNTIXDXXAXXXFIIXWLXXTKITXX

SEQ ID NO: 196 - protein, 37 aa, Artificial Sequence
  intestinotrophic analog of GLP-2
  VARIANT (1)...(1): Xaa = Arg, Lys or His, with an amino terminal group or an amino terminal blocking group
  VARIANT (2)...(2): Xaa = His or Tyr
  VARIANT (3)...(3): Xaa = is Ala, Gly, D-Ala, Pro, Ile, Nva (Norvaline), alpha -aminobutyric acid, or an Ala-replacement amino acid conferring on said analog resistance to DPP-IV enzyme
  VARIANT (4)...(4): Xaa = Asp, Glu, Pro or Hpro (hydroxyproline); or Xaa-Xaa in positions 3 and 4 taken together are Xaa(psi)(CH(OH)CH2)Xaa; Xaa(psi)(CH2NH2)Xaa or Xaa(psi)(CHCH)Xaa
  VARIANT (5)...(5): Xaa = Gly or Ala
  VARIANT (6)...(6): Xaa = Ser or Ala
  VARIANT (11)...(11): Xaa = Met, Leu, Ile or an oxidatively stable Met-replacement amino acid
  VARIANT (15)...(15): Xaa = Leu or Lys
  VARIANT (17)...(17): Xaa = Asn, Lys or Ala
  VARIANT (18)...(18): Xaa = Leu or Lys
  VARIANT (20)...(20): Xaa = Ala or Thr
  VARIANT (21)...(21): Xaa = Arg, Lys, His or Ala
  VARIANT (22)...(22): Xaa = Asp or Lys
  VARIANT (26)...(26): Xaa = Asn or Ala
  VARIANT (29)...(29): Xaa = Ile or Leu
  VARIANT (30)...(30): Xaa = Gln or His
  VARIANT (35)...(35): Xaa = Asp or Asn
  VARIANT (36)...(36): Xaa = Arg, Lys or His
  VARIANT (37)...(37): Xaa = Arg, Lys or His with a COOH, CONH2 or a C-terminal blocking group
XXXXXXFSDEXNTIXDXXAXXXFIIXWLXXTKITXXX

SEQ ID NO: 197 - protein, 36 aa, Artificial Sequence
  intestinotrophic analog of GLP-2
  VARIANT (1)...(1): Xaa = Arg, Lys or His, with an amino terminal group or an amino terminal blocking group
  VARIANT (2)...(2): Xaa = Arg, Lys or His
  VARIANT (3)...(3): Xaa = His or Tyr
  VARIANT (4)...(4): Xaa = is Ala, Gly, D-Ala, Pro, Ile, Nva (Norvaline), alpha -aminobutyric acid, or an Ala-replacement amino acid conferring on said analog resistance to DPP-IV enzyme
  VARIANT (5)...(5): Xaa = Asp, Glu, Pro or Hpro (hydroxyproline); or Xaa-Xaa in positions 4 and 5 taken together are Xaa(psi)(CH(OH)CH2)Xaa; Xaa(psi)(CH2NH2)Xaa or Xaa(psi)(CHCH)Xaa
  VARIANT (6)...(6): Xaa = Gly or Ala
  VARIANT (7)...(7): Xaa = Ser or Ala
  VARIANT (12)...(12): Xaa = Met, Leu, Ile or an oxidatively stable Met-replacement amino acid
  VARIANT (16)...(16): Xaa = Leu or Lys
  VARIANT (18)...(18): Xaa = Asn, Lys or Ala
  VARIANT (19)...(19): Xaa = Leu or Lys
  VARIANT (21)...(21): Xaa = Ala or Thr
  VARIANT (22)...(22): Xaa = Arg, Lys, His or Ala
  VARIANT (23)...(23): Xaa = Asp or Lys
  VARIANT (27)...(27): Xaa = Asn or Ala
  VARIANT (30)...(30): Xaa = Ile or Leu
  VARIANT (31)...(31): Xaa = Gln or His
  VARIANT (36)...(36): Xaa = Asp or Asn, with a COOH, CONH2 or a C-terminal blocking group
XXXXXXXFSDEXNTIXDXXAXXXFIIXWLXXTKITX

SEQ ID NO: 198 - protein, 37 aa, Artificial Sequence
  intestinotrophic analog of GLP-2
  VARIANT (1)...(1): Xaa = Arg, Lys or His, with an amino terminal group or an amino terminal blocking group
  VARIANT (2)...(2): Xaa = Arg, Lys or His
  VARIANT (3)...(3): Xaa = His or Tyr
  VARIANT (4)...(4): Xaa = is Ala, Gly, D-Ala, Pro, Ile, Nva (Norvaline), alpha -aminobutyric acid, or an Ala-replacement amino acid conferring on said analog resistance to DPP-IV enzyme
  VARIANT (5)...(5): Xaa = Asp, Glu, Pro or Hpro (hydroxyproline); or Xaa-Xaa in positions 4 and 5 taken together are Xaa(psi)(CH(OH)CH2)Xaa; Xaa(psi)(CH2NH2)Xaa or Xaa(psi)(CHCH)Xaa
  VARIANT (6)...(6): Xaa = Gly or Ala
  VARIANT (7)...(7): Xaa = Ser or Ala
  VARIANT (12)...(12): Xaa = Met, Leu, Ile or an oxidatively stable Met-replacement amino acid
  VARIANT (16)...(16): Xaa = Leu or Lys
  VARIANT (18)...(18): Xaa = Asn, Lys or Ala
  VARIANT (19)...(19): Xaa = Leu or Lys
  VARIANT (21)...(21): Xaa = Ala or Thr
  VARIANT (22)...(22): Xaa = Arg, Lys, His or Ala
  VARIANT (23)...(23): Xaa = Asp or Lys
  VARIANT (27)...(27): Xaa = Asn or Ala
  VARIANT (30)...(30): Xaa = Ile or Leu
  VARIANT (31)...(31): Xaa = Gln or His
  VARIANT (36)...(36): Xaa = Asp or Asn
  VARIANT (37)...(37): Xaa = Arg, Lys or His with a COOH, CONH2 or a C-terminal blocking group
XXXXXXXFSDEXNTIXDXXAXXXFIIXWLXXTKITXX

SEQ ID NO: 199 - protein, 38 aa, Artificial Sequence
  intestinotrophic analog of GLP-2
  VARIANT (1)...(1): Xaa = Arg, Lys or His, with an amino terminal group or an amino terminal blocking group
  VARIANT (2)...(2): Xaa = Arg, Lys or His
  VARIANT (3)...(3): Xaa = His or Tyr
  VARIANT (4)...(4): Xaa = is Ala, Gly, D-Ala, Pro, Ile, Nva (Norvaline), alpha -aminobutyric acid, or an Ala-replacement amino acid conferring on said analog resistance to DPP-IV enzyme
  VARIANT (5)...(5): Xaa = Asp, Glu, Pro or Hpro (hydroxyproline); or Xaa-Xaa in positions 4 and 5 taken together are Xaa(psi)(CH(OH)CH2)Xaa; Xaa(psi)(CH2NH2)Xaa or Xaa(psi)(CHCH)Xaa
  VARIANT (6)...(6): Xaa = Gly or Ala
  VARIANT (7)...(7): Xaa = Ser or Ala
  VARIANT (12)...(12): Xaa = Met, Leu, Ile or an oxidatively stable Met-replacement amino acid
  VARIANT (16)...(16): Xaa = Leu or Lys
  VARIANT (18)...(18): Xaa = Asn, Lys or Ala
  VARIANT (19)...(19): Xaa = Leu or Lys
  VARIANT (21)...(21): Xaa = Ala or Thr
  VARIANT (22)...(22): Xaa = Arg, Lys, His or Ala
  VARIANT (23)...(23): Xaa = Asp or Lys
  VARIANT (27)...(27): Xaa = Asn or Ala
  VARIANT (30)...(30): Xaa = Ile or Leu
  VARIANT (31)...(31): Xaa = Gln or His
  VARIANT (36)...(36): Xaa = Asp or Asn
  VARIANT (37)...(37): Xaa = Arg, Lys or His
  VARIANT (38)...(38): Xaa = Arg, Lys or His with a COOH, CONH2 or a C-terminal blocking group
XXXXXXXFSDEXNTIXDXXAXXXFIIXWLXXTKITXXX

SEQ ID NO: 200 - protein, 33 aa, Artificial Sequence; identical to SEQ ID NO: 147
  intestinotrophic analog of GLP-2
  VARIANT (1)...(1): Xaa = His or Tyr, with an amino terminal group or an amino terminal blocking group
  VARIANT (2)...(2): Xaa = is Ala, Gly, D-Ala, Pro, Ile, Nva (Norvaline), alpha -aminobutyric acid, or an Ala-replacement amino acid conferring on said analog resistance to DPP-IV enzyme
  VARIANT (3)...(3): Xaa = Asp, Glu, Pro or Hpro (hydroxyproline); or Xaa-Xaa in positions 2 and 3 taken together are Xaa(psi)(CH(OH)CH2)Xaa; Xaa(psi)(CH2NH2)Xaa or Xaa(psi)(CHCH)Xaa
  VARIANT (4)...(4): Xaa = Gly or Ala
  VARIANT (5)...(5): Xaa = Ser or Ala
  VARIANT (10)...(10): Xaa = Met, Leu, Ile or an oxidatively stable Met-replacement amino acid
  VARIANT (14)...(14): Xaa = Leu or Lys
  VARIANT (16)...(16): Xaa = Asn, Lys or Ala
  VARIANT (17)...(17): Xaa = Leu or Lys
  VARIANT (19)...(19): Xaa = Ala or Thr
  VARIANT (20)...(20): Xaa = Arg, Lys, His or Ala
  VARIANT (21)...(21): Xaa = Asp or Lys
  VARIANT (27)...(27): Xaa = Ile or Leu
  VARIANT (28)...(28): Xaa = Gln or His
  VARIANT (33)...(33): Xaa = Asp or Asn, with a COOH, CONH2 or a C-terminal blocking group

SEQ ID NO: 201 - protein, 34 aa, Artificial Sequence; identical to SEQ ID NO: 148
  intestinotrophic analog of GLP-2
  VARIANT (1)...(1): Xaa = His or Tyr, with an amino terminal group or an amino terminal blocking group
  VARIANT (2)...(2): Xaa = is Ala, Gly, D-Ala, Pro, Ile, Nva (Norvaline), alpha -aminobutyric acid, or an Ala-replacement amino acid conferring on said analog resistance to DPP-IV enzyme
  VARIANT (3)...(3): Xaa = Asp, Glu, Pro or Hpro (hydroxyproline); or Xaa-Xaa in positions 2 and 3 taken together are Xaa(psi)(CH(OH)CH2)Xaa; Xaa(psi)(CH2NH2)Xaa or Xaa(psi)(CHCH)Xaa
  VARIANT (4)...(4): Xaa = Gly or Ala
  VARIANT (5)...(5): Xaa = Ser or Ala
  VARIANT (10)...(10): Xaa = Met, Leu, Ile or an oxidatively stable Met-replacement amino acid
  VARIANT (14)...(14): Xaa = Leu or Lys
  VARIANT (16)...(16): Xaa = Asn, Lys or Ala
  VARIANT (17)...(17): Xaa = Leu or Lys
  VARIANT (19)...(19): Xaa = Ala or Thr
  VARIANT (20)...(20): Xaa = Arg, Lys, His or Ala
  VARIANT (21)...(21): Xaa = Asp or Lys
  VARIANT (27)...(27): Xaa = Ile or Leu
  VARIANT (28)...(28): Xaa = Gln or His
  VARIANT (33)...(33): Xaa = Asp or Asn
  VARIANT (34)...(34): Xaa = Arg, Lys or His with a COOH, CONH2 or a C-terminal blocking group

SEQ ID NO: 202 - protein, 35 aa, Artificial Sequence
  intestinotrophic analog of GLP-2
  VARIANT (1)...(1): Xaa = His or Tyr, with an amino terminal group or an amino terminal blocking group
  VARIANT (2)...(2): Xaa = is Ala, Gly, D-Ala, Pro, Ile, Nva (Norvaline), alpha -aminobutyric acid, or an Ala-replacement amino acid conferring on said analog resistance to DPP-IV enzyme
  VARIANT (3)...(3): Xaa = Asp, Glu, Pro or Hpro (hydroxyproline); or Xaa-Xaa in positions 2 and 3 taken together are Xaa(psi)(CH(OH)CH2)Xaa; Xaa(psi)(CH2NH2)Xaa or Xaa(psi)(CHCH)Xaa
  VARIANT (4)...(4): Xaa = Gly or Ala
  VARIANT (5)...(5): Xaa = Ser or Ala
  VARIANT (10)...(10): Xaa = Met, Leu, Ile or an oxidatively stable Met-replacement amino acid
  VARIANT (14)...(14): Xaa = Leu or Lys
  VARIANT (16)...(16): Xaa = Asn, Lys or Ala
  VARIANT (17)...(17): Xaa = Leu or Lys
  VARIANT (19)...(19): Xaa = Ala or Thr
  VARIANT (20)...(20): Xaa = Arg, Lys, His or Ala
  VARIANT (21)...(21): Xaa = Asp or Lys
  VARIANT (27)...(27): Xaa = Ile or Leu
  VARIANT (28)...(28): Xaa = Gln or His
  VARIANT (33)...(33): Xaa = Asp or Asn
  VARIANT (34)...(34): Xaa = Arg, Lys or His
  VARIANT (35)...(35): Xaa = Arg, Lys or His with a COOH, CONH2 or a C-terminal blocking group
XXXXXFSDEXNTIXDXXAXXXFVQWLXXTKITXXX

SEQ ID NO: 203 - protein, 34 aa, Artificial Sequence; identical to SEQ ID NO: 150
  intestinotrophic analog of GLP-2
  VARIANT (1)...(1): Xaa = Arg, Lys or His, with an amino terminal group or an amino terminal blocking group
  VARIANT (2)...(2): Xaa = His or Tyr
  VARIANT (3)...(3): Xaa = is Ala, Gly, D-Ala, Pro, Ile, Nva (Norvaline), alpha -aminobutyric acid, or an Ala-replacement amino acid conferring on said analog resistance to DPP-IV enzyme
  VARIANT (4)...(4): Xaa = Asp, Glu, Pro or Hpro (hydroxyproline); or Xaa-Xaa in positions 3 and 4 taken together are Xaa(psi)(CH(OH)CH2)Xaa; Xaa(psi)(CH2NH2)Xaa or Xaa(psi)(CHCH)Xaa
  VARIANT (5)...(5): Xaa = Gly or Ala
  VARIANT (6)...(6): Xaa = Ser or Ala
  VARIANT (11)...(11): Xaa = Met, Leu, Ile or an oxidatively stable Met-replacement amino acid
  VARIANT (15)...(15): Xaa = Leu or Lys
  VARIANT (17)...(17): Xaa = Asn, Lys or Ala
  VARIANT (18)...(18): Xaa = Leu or Lys
  VARIANT (20)...(20): Xaa = Ala or Thr
  VARIANT (21)...(21): Xaa = Arg, Lys, His or Ala
  VARIANT (22)...(22): Xaa = Asp or Lys
  VARIANT (28)...(28): Xaa = Ile or Leu
  VARIANT (29)...(29): Xaa = Gln or His
  VARIANT (34)...(34): Xaa = Asp or Asn, with a COOH, CONH2 or a C-terminal blocking group

SEQ ID NO: 204 - protein, 35 aa, Artificial Sequence; identical to SEQ ID NO: 151
  intestinotrophic analog of GLP-2
  VARIANT (1)...(1): Xaa = Arg, Lys or His, with an amino terminal group or an amino terminal blocking group
  VARIANT (2)...(2): Xaa = His or Tyr
  VARIANT (3)...(3): Xaa = is Ala, Gly, D-Ala, Pro, Ile, Nva (Norvaline), alpha -aminobutyric acid, or an Ala-replacement amino acid conferring on said analog resistance to DPP-IV enzyme
  VARIANT (4)...(4): Xaa = Asp, Glu, Pro or Hpro (hydroxyproline); or Xaa-Xaa in positions 3 and 4 taken together are Xaa(psi)(CH(OH)CH2)Xaa; Xaa(psi)(CH2NH2)Xaa or Xaa(psi)(CHCH)Xaa
  VARIANT (5)...(5): Xaa = Gly or Ala
  VARIANT (6)...(6): Xaa = Ser or Ala
  VARIANT (11)...(11): Xaa = Met, Leu, Ile or an oxidatively stable Met-replacement amino acid
  VARIANT (15)...(15): Xaa = Leu or Lys
  VARIANT (17)...(17): Xaa = Asn, Lys or Ala
  VARIANT (18)...(18): Xaa = Leu or Lys
  VARIANT (20)...(20): Xaa = Ala or Thr
  VARIANT (21)...(21): Xaa = Arg, Lys, His or Ala
  VARIANT (22)...(22): Xaa = Asp or Lys
  VARIANT (28)...(28): Xaa = Ile or Leu
  VARIANT (29)...(29): Xaa = Gln or His
  VARIANT (34)...(34): Xaa = Asp or Asn
  VARIANT (35)...(35): Xaa = Arg, Lys or His with a COOH, CONH2 or a C-terminal blocking group

SEQ ID NO: 205 - protein, 36 aa, Artificial Sequence
  intestinotrophic analog of GLP-2
  VARIANT (1)...(1): Xaa = Arg, Lys or His, with an amino terminal group or an amino terminal blocking group
  VARIANT (2)...(2): Xaa = His or Tyr
  VARIANT (3)...(3): Xaa = is Ala, Gly, D-Ala, Pro, Ile, Nva (Norvaline), alpha -aminobutyric acid, or an Ala-replacement amino acid conferring on said analog resistance to DPP-IV enzyme
  VARIANT (4)...(4): Xaa = Asp, Glu, Pro or Hpro (hydroxyproline); or Xaa-Xaa in positions 3 and 4 taken together are Xaa(psi)(CH(OH)CH2)Xaa; Xaa(psi)(CH2NH2)Xaa or Xaa(psi)(CHCH)Xaa
  VARIANT (5)...(5): Xaa = Gly or Ala
  VARIANT (6)...(6): Xaa = Ser or Ala
  VARIANT (11)...(11): Xaa = Met, Leu, Ile or an oxidatively stable Met-replacement amino acid
  VARIANT (15)...(15): Xaa = Leu or Lys
  VARIANT (17)...(17): Xaa = Asn, Lys or Ala
  VARIANT (18)...(18): Xaa = Leu or Lys
  VARIANT (20)...(20): Xaa = Ala or Thr
  VARIANT (21)...(21): Xaa = Arg, Lys, His or Ala
  VARIANT (22)...(22): Xaa = Asp or Lys
  VARIANT (28)...(28): Xaa = Ile or Leu
  VARIANT (29)...(29): Xaa = Gln or His
  VARIANT (34)...(34): Xaa = Asp or Asn
  VARIANT (35)...(35): Xaa = Arg, Lys or His
  VARIANT (36)...(36): Xaa = Arg, Lys or His with a COOH, CONH2 or a C-terminal blocking group
XXXXXXFSDEXNTIXDXXAXXXFVQWLXXTKITXXX

SEQ ID NO: 206 - protein, 35 aa, Artificial Sequence; identical to SEQ ID NO: 153
  intestinotrophic analog of GLP-2
  VARIANT (1)...(1): Xaa = Arg, Lys or His, with an amino terminal group or an amino terminal blocking group
  VARIANT (2)...(2): Xaa = Arg, Lys or His
  VARIANT (3)...(3): Xaa = His or Tyr
  VARIANT (4)...(4): Xaa = is Ala, Gly, D-Ala, Pro, Ile, Nva (Norvaline), alpha -aminobutyric acid, or an Ala-replacement amino acid conferring on said analog resistance to DPP-IV enzyme
  VARIANT (5)...(5): Xaa = Asp, Glu, Pro or Hpro (hydroxyproline); or Xaa-Xaa in positions 4 and 5 taken together are Xaa(psi)(CH(OH)CH2)Xaa; Xaa(psi)(CH2NH2)Xaa or Xaa(psi)(CHCH)Xaa
  VARIANT (6)...(6): Xaa = Gly or Ala
  VARIANT (7)...(7): Xaa = Ser or Ala
  VARIANT (12)...(12): Xaa = Met, Leu, Ile or an oxidatively stable Met-replacement amino acid
  VARIANT (16)...(16): Xaa = Leu or Lys
  VARIANT (18)...(18): Xaa = Asn, Lys or Ala
  VARIANT (19)...(19): Xaa = Leu or Lys
  VARIANT (21)...(21): Xaa = Ala or Thr
  VARIANT (22)...(22): Xaa = Arg, Lys, His or Ala
  VARIANT (23)...(23): Xaa = Asp or Lys
  VARIANT (29)...(29): Xaa = Ile or Leu
  VARIANT (30)...(30): Xaa = Gln or His
  VARIANT (35)...(35): Xaa = Asp or Asn, with a COOH, CONH2 or a C-terminal blocking group

SEQ ID NO: 207 - protein, 36 aa, Artificial Sequence; identical to SEQ ID NO: 154
  intestinotrophic analog of GLP-2
  VARIANT (1)...(1): Xaa = Arg, Lys or His, with an amino terminal group or an amino terminal blocking group
  VARIANT (2)...(2): Xaa = Arg, Lys or His
  VARIANT (3)...(3): Xaa = His or Tyr
  VARIANT (4)...(4): Xaa = is Ala, Gly, D-Ala, Pro, Ile, Nva (Norvaline), alpha -aminobutyric acid, or an Ala-replacement amino acid conferring on said analog resistance to DPP-IV enzyme
  VARIANT (5)...(5): Xaa = Asp, Glu, Pro or Hpro (hydroxyproline); or Xaa-Xaa in positions 4 and 5 taken together are Xaa(psi)(CH(OH)CH2)Xaa; Xaa(psi)(CH2NH2)Xaa or Xaa(psi)(CHCH)Xaa
  VARIANT (6)...(6): Xaa = Gly or Ala
  VARIANT (7)...(7): Xaa = Ser or Ala
  VARIANT (12)...(12): Xaa = Met, Leu, Ile or an oxidatively stable Met-replacement amino acid
  VARIANT (16)...(16): Xaa = Leu or Lys
  VARIANT (18)...(18): Xaa = Asn, Lys or Ala
  VARIANT (19)...(19): Xaa = Leu or Lys
  VARIANT (21)...(21): Xaa = Ala or Thr
  VARIANT (22)...(22): Xaa = Arg, Lys, His or Ala
  VARIANT (23)...(23): Xaa = Asp or Lys
  VARIANT (29)...(29): Xaa = Ile or Leu
  VARIANT (30)...(30): Xaa = Gln or His
  VARIANT (35)...(35): Xaa = Asp or Asn
  VARIANT (36)...(36): Xaa = Arg, Lys or His with a COOH, CONH2 or a C-terminal blocking group

SEQ ID NO: 208 - protein, 37 aa, Artificial Sequence
  intestinotrophic analog of GLP-2
  VARIANT (1)...(1): Xaa = Arg, Lys or His, with an amino terminal group or an amino terminal blocking group
  VARIANT (2)...(2): Xaa = Arg, Lys or His
  VARIANT (3)...(3): Xaa = His or Tyr
  VARIANT (4)...(4): Xaa = is Ala, Gly, D-Ala, Pro, Ile, Nva (Norvaline), alpha -aminobutyric acid, or an Ala-replacement amino acid conferring on said analog resistance to DPP-IV enzyme
  VARIANT (5)...(5): Xaa = Asp, Glu, Pro or Hpro (hydroxyproline); or Xaa-Xaa in positions 4 and 5 taken together are Xaa(psi)(CH(OH)CH2)Xaa; Xaa(psi)(CH2NH2)Xaa or Xaa(psi)(CHCH)Xaa
  VARIANT (6)...(6): Xaa = Gly or Ala
  VARIANT (7)...(7): Xaa = Ser or Ala
  VARIANT (12)...(12): Xaa = Met, Leu, Ile or an oxidatively stable Met-replacement amino acid
  VARIANT (16)...(16): Xaa = Leu or Lys
  VARIANT (18)...(18): Xaa = Asn, Lys or Ala
  VARIANT (19)...(19): Xaa = Leu or Lys
  VARIANT (21)...(21): Xaa = Ala or Thr
  VARIANT (22)...(22): Xaa = Arg, Lys, His or Ala
  VARIANT (23)...(23): Xaa = Asp or Lys
  VARIANT (29)...(29): Xaa = Ile or Leu
  VARIANT (30)...(30): Xaa = Gln or His
  VARIANT (35)...(35): Xaa = Asp or Asn
  VARIANT (36)...(36): Xaa = Arg, Lys or His
  VARIANT (37)...(37): Xaa = Arg, Lys or His with a COOH, CONH2 or a C-terminal blocking group
XXXXXXXFSDEXNTIXDXXAXXXFVQWLXXTKITXXX

SEQ ID NO: 209 - protein, 33 aa, Artificial Sequence; identical to SEQ ID NO: 156
  intestinotrophic analog of GLP-2
  VARIANT (1)...(1): Xaa = His or Tyr, with an amino terminal group or an amino terminal blocking group
  VARIANT (2)...(2): Xaa = is Ala, Gly, D-Ala, Pro, Ile, Nva (Norvaline), alpha -aminobutyric acid, or an Ala-replacement amino acid conferring on said analog resistance to DPP-IV enzyme
  VARIANT (3)...(3): Xaa = Asp, Glu, Pro or Hpro (hydroxyproline); or Xaa-Xaa in positions 2 and 3 taken together are Xaa(psi)(CH(OH)CH2)Xaa; Xaa(psi)(CH2NH2)Xaa or Xaa(psi)(CHCH)Xaa
  VARIANT (4)...(4): Xaa = Gly or Ala
  VARIANT (5)...(5): Xaa = Ser or Ala
  VARIANT (10)...(10): Xaa = Met, Leu, Ile or an oxidatively stable Met-replacement amino acid
  VARIANT (14)...(14): Xaa = Leu or Lys
  VARIANT (16)...(16): Xaa = Asn, Lys or Ala
  VARIANT (17)...(17): Xaa = Leu or Lys
  VARIANT (19)...(19): Xaa = Ala or Thr
  VARIANT (20)...(20): Xaa = Arg, Lys, His or Ala
  VARIANT (21)...(21): Xaa = Asp or Lys
  VARIANT (24)...(24): Xaa = Asn or Ala
  VARIANT (27)...(27): Xaa = Ile or Leu
  VARIANT (28)...(28): Xaa = Gln or His
  VARIANT (33)...(33): Xaa = Asp or Asn, with a COOH, CONH2 or a C-terminal blocking group

SEQ ID NO: 210 - protein, 34 aa, Artificial Sequence; identical to SEQ ID NO: 157
  intestinotrophic analog of GLP-2
  VARIANT (1)...(1): Xaa = His or Tyr, with an amino terminal group or an amino terminal blocking group
  VARIANT (2)...(2): Xaa = is Ala, Gly, D-Ala, Pro, Ile, Nva (Norvaline), alpha -aminobutyric acid, or an Ala-replacement amino acid conferring on said analog resistance to DPP-IV enzyme
  VARIANT (3)...(3): Xaa = Asp, Glu, Pro or Hpro (hydroxyproline); or Xaa-Xaa in positions 2 and 3 taken together are Xaa(psi)(CH(OH)CH2)Xaa; Xaa(psi)(CH2NH2)Xaa or Xaa(psi)(CHCH)Xaa
  VARIANT (4)...(4): Xaa = Gly or Ala
  VARIANT (5)...(5): Xaa = Ser or Ala
  VARIANT (10)...(10): Xaa = Met, Leu, Ile or an oxidatively stable Met-replacement amino acid
  VARIANT (14)...(14): Xaa = Leu or Lys
  VARIANT (16)...(16): Xaa = Asn, Lys or Ala
  VARIANT (17)...(17): Xaa = Leu or Lys
  VARIANT (19)...(19): Xaa = Ala or Thr
  VARIANT (20)...(20): Xaa = Arg, Lys, His or Ala
  VARIANT (21)...(21): Xaa = Asp or Lys
  VARIANT (24)...(24): Xaa = Asn or Ala
  VARIANT (27)...(27): Xaa = Ile or Leu
  VARIANT (28)...(28): Xaa = Gln or His
  VARIANT (33)...(33): Xaa = Asp or Asn
  VARIANT (34)...(34): Xaa = Arg, Lys or His with a COOH, CONH2 or a C-terminal blocking group

SEQ ID NO: 211 - protein, 35 aa, Artificial Sequence
  intestinotrophic analog of GLP-2
  VARIANT (1)...(1): Xaa = His or Tyr, with an amino terminal group or an amino terminal blocking group
  VARIANT (2)...(2): Xaa = is Ala, Gly, D-Ala, Pro, Ile, Nva (Norvaline), alpha -aminobutyric acid, or an Ala-replacement amino acid conferring on said analog resistance to DPP-IV enzyme
  VARIANT (3)...(3): Xaa = Asp, Glu, Pro or Hpro (hydroxyproline); or Xaa-Xaa in positions 2 and 3 taken together are Xaa(psi)(CH(OH)CH2)Xaa; Xaa(psi)(CH2NH2)Xaa or Xaa(psi)(CHCH)Xaa
  VARIANT (4)...(4): Xaa = Gly or Ala
  VARIANT (5)...(5): Xaa = Ser or Ala
  VARIANT (10)...(10): Xaa = Met, Leu, Ile or an oxidatively stable Met-replacement amino acid
  VARIANT (14)...(14): Xaa = Leu or Lys
  VARIANT (16)...(16): Xaa = Asn, Lys or Ala
  VARIANT (17)...(17): Xaa = Leu or Lys
  VARIANT (19)...(19): Xaa = Ala or Thr
  VARIANT (20)...(20): Xaa = Arg, Lys, His or Ala
  VARIANT (21)...(21): Xaa = Asp or Lys
  VARIANT (24)...(24): Xaa = Asn or Ala
  VARIANT (27)...(27): Xaa = Ile or Leu
  VARIANT (28)...(28): Xaa = Gln or His
  VARIANT (33)...(33): Xaa = Asp or Asn
  VARIANT (34)...(34): Xaa = Arg, Lys or His with a COOH, CONH2 or a C-terminal blocking group
  VARIANT (35)...(35): Xaa = Arg, Lys or His with a COOH, CONH2 or a C-terminal blocking group
XXXXXFSDGXNTVXDXXAXXXFIXWLXXTKITXXX

SEQ ID NO: 212 - protein, 34 aa, Artificial Sequence; identical to SEQ ID NO: 159
  intestinotrophic analog of GLP-2
  VARIANT (1)...(1): Xaa = Arg, Lys or His, with an amino terminal group or an amino terminal blocking group
  VARIANT (2)...(2): Xaa = His or Tyr
  VARIANT (3)...(3): Xaa = is Ala, Gly, D-Ala, Pro, Ile, Nva (Norvaline), alpha -aminobutyric acid, or an Ala-replacement amino acid conferring on said analog resistance to DPP-IV enzyme
  VARIANT (4)...(4): Xaa = Asp, Glu, Pro or Hpro (hydroxyproline); or Xaa-Xaa in positions 3 and 4 taken together are Xaa(psi)(CH(OH)CH2)Xaa; Xaa(psi)(CH2NH2)Xaa or Xaa(psi)(CHCH)Xaa
  VARIANT (5)...(5): Xaa = Gly or Ala
  VARIANT (6)...(6): Xaa = Ser or Ala
  VARIANT (11)...(11): Xaa = Met, Leu, Ile or an oxidatively stable Met-replacement amino acid
  VARIANT (15)...(15): Xaa = Leu or Lys
  VARIANT (17)...(17): Xaa = Asn, Lys or Ala
  VARIANT (18)...(18): Xaa = Leu or Lys
  VARIANT (20)...(20): Xaa = Ala or Thr
  VARIANT (21)...(21): Xaa = Arg, Lys, His or Ala
  VARIANT (22)...(22): Xaa = Asp or Lys
  VARIANT (25)...(25): Xaa = Asn or Ala
  VARIANT (28)...(28): Xaa = Ile or Leu
  VARIANT (29)...(29): Xaa = Gln or His
  VARIANT (34)...(34): Xaa = Asp or Asn, with a COOH, CONH2 or a C-terminal blocking group

SEQ ID NO: 213 - protein, 35 aa, Artificial Sequence; identical to SEQ ID NO: 160
  intestinotrophic analog of GLP-2
  VARIANT (1)...(1): Xaa = Arg, Lys or His, with an amino terminal group or an amino terminal blocking group
  VARIANT (2)...(2): Xaa = His or Tyr,
  VARIANT (3)...(3): Xaa = is Ala, Gly, D-Ala, Pro, Ile, Nva (Norvaline), alpha -aminobutyric acid, or an Ala-replacement amino acid conferring on said analog resistance to DPP-IV enzyme
  VARIANT (4)...(4): Xaa = Asp, Glu, Pro or Hpro (hydroxyproline); or Xaa-Xaa in positions 3 and 4 taken together are Xaa(psi)(CH(OH)CH2)Xaa; Xaa(psi)(CH2NH2)Xaa or Xaa(psi)(CHCH)Xaa
  VARIANT (5)...(5): Xaa = Gly or Ala
  VARIANT (6)...(6): Xaa = Ser or Ala
  VARIANT (11)...(11): Xaa = Met, Leu, Ile or an oxidatively stable Met-replacement amino acid
  VARIANT (15)...(15): Xaa = Leu or Lys
  VARIANT (17)...(17): Xaa = Asn, Lys or Ala
  VARIANT (18)...(18): Xaa = Leu or Lys
  VARIANT (20)...(20): Xaa = Ala or Thr
  VARIANT (21)...(21): Xaa = Arg, Lys, His or Ala
  VARIANT (22)...(22): Xaa = Asp or Lys
  VARIANT (25)...(25): Xaa = Asn or Ala
  VARIANT (28)...(28): Xaa = Ile or Leu
  VARIANT (29)...(29): Xaa = Gln or His
  VARIANT (34)...(34): Xaa = Asp or Asn
  VARIANT (35)...(35): Xaa = Arg, Lys or His with a COOH, CONH2 or a C-terminal blocking group

SEQ ID NO: 214 - protein, 36 aa, Artificial Sequence
  intestinotrophic analog of GLP-2
  VARIANT (1)...(1): Xaa = Arg, Lys or His, with an amino terminal group or an amino terminal blocking group
  VARIANT (2)...(2): Xaa = His or Tyr
  VARIANT (3)...(3): Xaa = is Ala, Gly, D-Ala, Pro, Ile, Nva (Norvaline), alpha -aminobutyric acid, or an Ala-replacement amino acid conferring on said analog resistance to DPP-IV enzyme
  VARIANT (4)...(4): Xaa = Asp, Glu, Pro or Hpro (hydroxyproline); or Xaa-Xaa in positions 3 and 4 taken together are Xaa(psi)(CH(OH)CH2)Xaa; Xaa(psi)(CH2NH2)Xaa or Xaa(psi)(CHCH)Xaa
  VARIANT (5)...(5): Xaa = Gly or Ala
  VARIANT (6)...(6): Xaa = Ser or Ala
  VARIANT (11)...(11): Xaa = Met, Leu, Ile or an oxidatively stable Met-replacement amino acid
  VARIANT (15)...(15): Xaa = Leu or Lys
  VARIANT (17)...(17): Xaa = Asn, Lys or Ala
  VARIANT (18)...(18): Xaa = Leu or Lys
  VARIANT (20)...(20): Xaa = Ala or Thr
  VARIANT (21)...(21): Xaa = Arg, Lys, His or Ala
  VARIANT (22)...(22): Xaa = Asp or Lys
  VARIANT (25)...(25): Xaa = Asn or Ala
  VARIANT (28)...(28): Xaa = Ile or Leu
  VARIANT (29)...(29): Xaa = Gln or His
  VARIANT (34)...(34): Xaa = Asp or Asn
  VARIANT (35)...(35): Xaa = Arg, Lys or His
  VARIANT (36)...(36): Xaa = Arg, Lys or His with a COOH, CONH2 or a C-terminal blocking group
XXXXXXFSDGXNTVXDXXAXXXFIXWLXXTKITXXX

SEQ ID NO: 215 - protein, 35 aa, Artificial Sequence; identical to SEQ ID NO: 162
  intestinotrophic analog of GLP-2
  VARIANT (1)...(1): Xaa = Arg, Lys or His, with an amino terminal group or an amino terminal blocking group
  VARIANT (2)...(2): Xaa = Arg, Lys or His
  VARIANT (3)...(3): Xaa = His or Tyr
  VARIANT (4)...(4): Xaa = is Ala, Gly, D-Ala, Pro, Ile, Nva (Norvaline), alpha -aminobutyric acid, or an Ala-replacement amino acid conferring on said analog resistance to DPP-IV enzyme
  VARIANT (5)...(5): Xaa = Asp, Glu, Pro or Hpro (hydroxyproline); or Xaa-Xaa in positions 4 and 5 taken together are Xaa(psi)(CH(OH)CH2)Xaa; Xaa(psi)(CH2NH2)Xaa or Xaa(psi)(CHCH)Xaa
  VARIANT (6)...(6): Xaa = Gly or Ala
  VARIANT (7)...(7): Xaa = Ser or Ala
  VARIANT (12)...(12): Xaa = Met, Leu, Ile or an oxidatively stable Met-replacement amino acid
  VARIANT (16)...(16): Xaa = Leu or Lys
  VARIANT (18)...(18): Xaa = Asn, Lys or Ala
  VARIANT (19)...(19): Xaa = Leu or Lys
  VARIANT (21)...(21): Xaa = Ala or Thr
  VARIANT (22)...(22): Xaa = Arg, Lys, His or Ala
  VARIANT (23)...(23): Xaa = Asp or Lys
  VARIANT (26)...(26): Xaa = Asn or Ala
  VARIANT (29)...(29): Xaa = Ile or Leu
  VARIANT (30)...(30): Xaa = Gln or His
  VARIANT (35)...(35): Xaa = Asp or Asn, with a COOH, CONH2 or a C-terminal blocking group

SEQ ID NO: 216 - protein, 36 aa, Artificial Sequence; identical to SEQ ID NO: 163
  intestinotrophic analog of GLP-2
  VARIANT (1)...(1): Xaa = Arg, Lys or His, with an amino terminal group or an amino terminal blocking group
  VARIANT (2)...(2): Xaa = Arg, Lys or His
  VARIANT (3)...(3): Xaa = His or Tyr
  VARIANT (4)...(4): Xaa = is Ala, Gly, D-Ala, Pro, Ile, Nva (Norvaline), alpha -aminobutyric acid, or an Ala-replacement amino acid conferring on said analog resistance to DPP-IV enzyme
  VARIANT (5)...(5): Xaa = Asp, Glu, Pro or Hpro (hydroxyproline); or Xaa-Xaa in positions 4 and 5 taken together are Xaa(psi)(CH(OH)CH2)Xaa; Xaa(psi)(CH2NH2)Xaa or Xaa(psi)(CHCH)Xaa
  VARIANT (6)...(6): Xaa = Gly or Ala
  VARIANT (7)...(7): Xaa = Ser or Ala
  VARIANT (12)...(12): Xaa = Met, Leu, Ile or an oxidatively stable Met-replacement amino acid
  VARIANT (16)...(16): Xaa = Leu or Lys
  VARIANT (18)...(18): Xaa = Asn, Lys or Ala
  VARIANT (19)...(19): Xaa = Leu or Lys
  VARIANT (21)...(21): Xaa = Ala or Thr
  VARIANT (22)...(22): Xaa = Arg, Lys, His or Ala
  VARIANT (23)...(23): Xaa = Asp or Lys
  VARIANT (26)...(26): Xaa = Asn or Ala
  VARIANT (29)...(29): Xaa = Ile or Leu
  VARIANT (30)...(30): Xaa = Gln or His
  VARIANT (35)...(35): Xaa = Asp or Asn
  VARIANT (36)...(36): Xaa = Arg, Lys or His with a COOH, CONH2 or a C-terminal blocking group

SEQ ID NO: 217 - protein, 37 aa, Artificial Sequence
  intestinotrophic analog of GLP-2
  VARIANT (1)...(1): Xaa = Arg, Lys or His, with an amino terminal group or an amino terminal blocking group
  VARIANT (2)...(2): Xaa = Arg, Lys or His
  VARIANT (3)...(3): Xaa = His or Tyr
  VARIANT (4)...(4): Xaa = is Ala, Gly, D-Ala, Pro, Ile, Nva (Norvaline), alpha -aminobutyric acid, or an Ala-replacement amino acid conferring on said analog resistance to DPP-IV enzyme
  VARIANT (5)...(5): Xaa = Asp, Glu, Pro or Hpro (hydroxyproline); or Xaa-Xaa in positions 4 and 5 taken together are Xaa(psi)(CH(OH)CH2)Xaa; Xaa(psi)(CH2NH2)Xaa or Xaa(psi)(CHCH)Xaa
  VARIANT (6)...(6): Xaa = Gly or Ala
  VARIANT (7)...(7): Xaa = Ser or Ala
  VARIANT (12)...(12): Xaa = Met, Leu, Ile or an oxidatively stable Met-replacement amino acid
  VARIANT (16)...(16): Xaa = Leu or Lys
  VARIANT (18)...(18): Xaa = Asn, Lys or Ala
  VARIANT (19)...(19): Xaa = Leu or Lys
  VARIANT (21)...(21): Xaa = Ala or Thr
  VARIANT (22)...(22): Xaa = Arg, Lys, His or Ala
  VARIANT (23)...(23): Xaa = Asp or Lys
  VARIANT (26)...(26): Xaa = Asn or Ala
  VARIANT (29)...(29): Xaa = Ile or Leu
  VARIANT (30)...(30): Xaa = Gln or His
  VARIANT (35)...(35): Xaa = Asp or Asn
  VARIANT (36)...(36): Xaa = Arg, Lys or His
  VARIANT (37)...(37): Xaa = Arg, Lys or His with a COOH, CONH2 or a C-terminal blocking group
XXXXXXXFSDGXNTVXDXXAXXXFIXWLXXTKITXXX

SEQ ID NO: 218 - protein, 33 aa, Artificial Sequence; identical to SEQ ID NO: 165
  intestinotrophic analog of GLP-2
  VARIANT (1)...(1): Xaa = His or Tyr, with an amino terminal group or an amino terminal blocking group
  VARIANT (2)...(2): Xaa = is Ala, Gly, D-Ala, Pro, Ile, Nva (Norvaline), alpha -aminobutyric acid, or an Ala-replacement amino acid conferring on said analog resistance to DPP-IV enzyme
  VARIANT (3)...(3): Xaa = Asp, Glu, Pro or Hpro (hydroxyproline); or Xaa-Xaa in positions 2 and 3 taken together are Xaa(psi)(CH(OH)CH2)Xaa; Xaa(psi)(CH2NH2)Xaa or Xaa(psi)(CHCH)Xaa
  VARIANT (4)...(4): Xaa = Gly or Ala
  VARIANT (5)...(5): Xaa = Ser or Ala
  VARIANT (10)...(10): Xaa = Met, Leu, Ile or an oxidatively stable Met-replacement amino acid
  VARIANT (14)...(14): Xaa = Leu or Lys
  VARIANT (16)...(16): Xaa = Asn, Lys or Ala
  VARIANT (17)...(17): Xaa = Leu or Lys
  VARIANT (19)...(19): Xaa = Ala or Thr
  VARIANT (20)...(20): Xaa = Arg, Lys, His or Ala
  VARIANT (21)...(21): Xaa = Asp or Lys
  VARIANT (27)...(27): Xaa = Ile or Leu
  VARIANT (28)...(28): Xaa = Gln or His
  VARIANT (33)...(33): Xaa = Asp or Asn, with a COOH, CONH2 or a C-terminal blocking group

SEQ ID NO: 219 - protein, 34 aa, Artificial Sequence; identical to SEQ ID NO: 166
  intestinotrophic analog of GLP-2
  VARIANT (1)...(1): Xaa = His or Tyr, with an amino terminal group or an amino terminal blocking group
  VARIANT (2)...(2): Xaa = is Ala, Gly, D-Ala, Pro, Ile, Nva (Norvaline), alpha -aminobutyric acid, or an Ala-replacement amino acid conferring on said analog resistance to DPP-IV enzyme
  VARIANT (3)...(3): Xaa = Asp, Glu, Pro or Hpro (hydroxyproline); or Xaa-Xaa in positions 2 and 3 taken together are Xaa(psi)(CH(OH)CH2)Xaa; Xaa(psi)(CH2NH2)Xaa or Xaa(psi)(CHCH)Xaa
  VARIANT (4)...(4): Xaa = Gly or Ala
  VARIANT (5)...(5): Xaa = Ser or Ala
  VARIANT (10)...(10): Xaa = Met, Leu, Ile or an oxidatively stable Met-replacement amino acid
  VARIANT (14)...(14): Xaa = Leu or Lys
  VARIANT (16)...(16): Xaa = Asn, Lys or Ala
  VARIANT (17)...(17): Xaa = Leu or Lys
  VARIANT (19)...(19): Xaa = Ala or Thr
  VARIANT (20)...(20): Xaa = Arg, Lys, His or Ala
  VARIANT (21)...(21): Xaa = Asp or Lys
  VARIANT (27)...(27): Xaa = Ile or Leu
  VARIANT (28)...(28): Xaa = Gln or His
  VARIANT (33)...(33): Xaa = Asp or Asn
  VARIANT (34)...(34): Xaa = Arg, Lys or His with a COOH, CONH2 or a C-terminal blocking group

SEQ ID NO: 220 - protein, 35 aa, Artificial Sequence
  intestinotrophic analog of GLP-2
  VARIANT (1)...(1): Xaa = His or Tyr, with an amino terminal group or an amino terminal blocking group
  VARIANT (2)...(2): Xaa = is Ala, Gly, D-Ala, Pro, Ile, Nva (Norvaline), alpha -aminobutyric acid, or an Ala-replacement amino acid conferring on said analog resistance to DPP-IV enzyme
  VARIANT (3)...(3): Xaa = Asp, Glu, Pro or Hpro (hydroxyproline); or Xaa-Xaa in positions 2 and 3 taken together are Xaa(psi)(CH(OH)CH2)Xaa; Xaa(psi)(CH2NH2)Xaa or Xaa(psi)(CHCH)Xaa
  VARIANT (4)...(4): Xaa = Gly or Ala
  VARIANT (5)...(5): Xaa = Ser or Ala
  VARIANT (10)...(10): Xaa = Met, Leu, Ile or an oxidatively stable Met-replacement amino acid
  VARIANT (14)...(14): Xaa = Leu or Lys
  VARIANT (16)...(16): Xaa = Asn, Lys or Ala
  VARIANT (17)...(17): Xaa = Leu or Lys
  VARIANT (19)...(19): Xaa = Ala or Thr
  VARIANT (20)...(20): Xaa = Arg, Lys, His or Ala
  VARIANT (21)...(21): Xaa = Asp or Lys
  VARIANT (27)...(27): Xaa = Ile or Leu
  VARIANT (28)...(28): Xaa = Gln or His
  VARIANT (33)...(33): Xaa = Asp or Asn
  VARIANT (34)...(34): Xaa = Arg, Lys or His
  VARIANT (35)...(35): Xaa = Arg, Lys or His with a COOH, CONH2 or a C-terminal blocking group
XXXXXFSDGXNTVXDXXAXXXFVQWLXXTKITXXX

SEQ ID NO: 221 - protein, 34 aa, Artificial Sequence; identical to SEQ ID NO: 168
  intestinotrophic analog of GLP-2
  VARIANT (1)...(1): Xaa = Arg, Lys or His, with an amino terminal group or an amino terminal blocking group
  VARIANT (2)...(2): Xaa = His or Tyr
  VARIANT (3)...(3): Xaa = is Ala, Gly, D-Ala, Pro, Ile, Nva (Norvaline), alpha -aminobutyric acid, or an Ala-replacement amino acid conferring on said analog resistance to DPP-IV enzyme
  VARIANT (4)...(4): Xaa = Asp, Glu, Pro or Hpro (hydroxyproline); or Xaa-Xaa in positions 3 and 4 taken together are Xaa(psi)(CH(OH)CH2)Xaa; Xaa(psi)(CH2NH2)Xaa or Xaa(psi)(CHCH)Xaa
  VARIANT (5)...(5): Xaa = Gly or Ala
  VARIANT (6)...(6): Xaa = Ser or Ala
  VARIANT (11)...(11): Xaa = Met, Leu, Ile or an oxidatively stable Met-replacement amino acid
  VARIANT (15)...(15): Xaa = Leu or Lys
  VARIANT (17)...(17): Xaa = Asn, Lys or Ala
  VARIANT (18)...(18): Xaa = Leu or Lys
  VARIANT (20)...(20): Xaa = Ala or Thr
  VARIANT (21)...(21): Xaa = Arg, Lys, His or Ala
  VARIANT (22)...(22): Xaa = Asp or Lys
  VARIANT (28)...(28): Xaa = Ile or Leu
  VARIANT (29)...(29): Xaa = Gln or His
  VARIANT (34)...(34): Xaa = Asp or Asn, with a COOH, CONH2 or a C-terminal blocking group

SEQ ID NO: 222 - protein, 35 aa, Artificial Sequence; identical to SEQ ID NO: 169
  intestinotrophic analog of GLP-2
  VARIANT (1)...(1): Xaa = Arg, Lys or His, with an amino terminal group or an amino terminal blocking group
  VARIANT (2)...(2): Xaa = His or Tyr
  VARIANT (3)...(3): Xaa = is Ala, Gly, D-Ala, Pro, Ile, Nva (Norvaline), alpha -aminobutyric acid, or an Ala-replacement amino acid conferring on said analog resistance to DPP-IV enzyme
  VARIANT (4)...(4): Xaa = Asp, Glu, Pro or Hpro (hydroxyproline); or Xaa-Xaa in positions 3 and 4 taken together are Xaa(psi)(CH(OH)CH2)Xaa; Xaa(psi)(CH2NH2)Xaa or Xaa(psi)(CHCH)Xaa
  VARIANT (5)...(5): Xaa = Gly or Ala
  VARIANT (6)...(6): Xaa = Ser or Ala
  VARIANT (11)...(11): Xaa = Met, Leu, Ile or an oxidatively stable Met-replacement amino acid
  VARIANT (15)...(15): Xaa = Leu or Lys
  VARIANT (17)...(17): Xaa = Asn, Lys or Ala
  VARIANT (18)...(18): Xaa = Leu or Lys
  VARIANT (20)...(20): Xaa = Ala or Thr
  VARIANT (21)...(21): Xaa = Arg, Lys, His or Ala
  VARIANT (22)...(22): Xaa = Asp or Lys
  VARIANT (28)...(28): Xaa = Ile or Leu
  VARIANT (29)...(29): Xaa = Gln or His
  VARIANT (34)...(34): Xaa = Asp or Asn
  VARIANT (35)...(35): Xaa = Arg, Lys or His with a COOH, CONH2 or a C-terminal blocking group

SEQ ID NO: 223 - protein, 36 aa, Artificial Sequence
  intestinotrophic analog of GLP-2
  VARIANT (1)...(1): Xaa = Arg, Lys or His, with an amino terminal group or an amino terminal blocking group
  VARIANT (2)...(2): Xaa = His or Tyr
  VARIANT (3)...(3): Xaa = is Ala, Gly, D-Ala, Pro, Ile, Nva (Norvaline), alpha -aminobutyric acid, or an Ala-replacement amino acid conferring on said analog resistance to DPP-IV enzyme
  VARIANT (4)...(4): Xaa = Asp, Glu, Pro or Hpro (hydroxyproline); or Xaa-Xaa in positions 3 and 4 taken together are Xaa(psi)(CH(OH)CH2)Xaa; Xaa(psi)(CH2NH2)Xaa or Xaa(psi)(CHCH)Xaa
  VARIANT (5)...(5): Xaa = Gly or Ala
  VARIANT (6)...(6): Xaa = Ser or Ala
  VARIANT (11)...(11): Xaa = Met, Leu, Ile or an oxidatively stable Met-replacement amino acid
  VARIANT (15)...(15): Xaa = Leu or Lys
  VARIANT (17)...(17): Xaa = Asn, Lys or Ala
  VARIANT (18)...(18): Xaa = Leu or Lys
  VARIANT (20)...(20): Xaa = Ala or Thr
  VARIANT (21)...(21): Xaa = Arg, Lys, His or Ala
  VARIANT (22)...(22): Xaa = Asp or Lys
  VARIANT (28)...(28): Xaa = Ile or Leu
  VARIANT (29)...(29): Xaa = Gln or His
  VARIANT (34)...(34): Xaa = Asp or Asn
  VARIANT (35)...(35): Xaa = Arg, Lys or His
  VARIANT (36)...(36): Xaa = Arg, Lys or His with a COOH, CONH2 or a C-terminal blocking group
XXXXXXFSDGXNTVXDXXAXXXFVQWLXXTKITXXX

SEQ ID NO: 224 - protein, 35 aa, Artificial Sequence; identical to SEQ ID NO: 171
  intestinotrophic analog of GLP-2
  VARIANT (1)...(1): Xaa = Arg, Lys or His, with an amino terminal group or an amino terminal blocking group
  VARIANT (2)...(2): Xaa = Arg, Lys or His
  VARIANT (3)...(3): Xaa = His or Tyr
  VARIANT (4)...(4): Xaa = is Ala, Gly, D-Ala, Pro, Ile, Nva (Norvaline), alpha -aminobutyric acid, or an Ala-replacement amino acid conferring on said analog resistance to DPP-IV enzyme
  VARIANT (5)...(5): Xaa = Asp, Glu, Pro or Hpro (hydroxyproline); or Xaa-Xaa in positions 4 and 5 taken together are Xaa(psi)(CH(OH)CH2)Xaa; Xaa(psi)(CH2NH2)Xaa or Xaa(psi)(CHCH)Xaa
  VARIANT (6)...(6): Xaa = Gly or Ala
  VARIANT (7)...(7): Xaa = Ser or Ala
  VARIANT (12)...(12): Xaa = Met, Leu, Ile or an oxidatively stable Met-replacement amino acid
  VARIANT (16)...(16): Xaa = Leu or Lys
  VARIANT (18)...(18): Xaa = Asn, Lys or Ala
  VARIANT (19)...(19): Xaa = Leu or Lys
  VARIANT (21)...(21): Xaa = Ala or Thr
  VARIANT (22)...(22): Xaa = Arg, Lys, His or Ala
  VARIANT (23)...(23): Xaa = Asp or Lys
  VARIANT (29)...(29): Xaa = Ile or Leu
  VARIANT (30)...(30): Xaa = Gln or His
  VARIANT (35)...(35): Xaa = Asp or Asn, with a COOH, CONH2 or a C-terminal blocking group

SEQ ID NO: 225 - protein, 36 aa, Artificial Sequence; identical to SEQ ID NO: 172
  intestinotrophic analog of GLP-2
  VARIANT (1)...(1): Xaa = Arg, Lys or His, with an amino terminal group or an amino terminal blocking group
  VARIANT (2)...(2): Xaa = Arg, Lys or His
  VARIANT (3)...(3): Xaa = His or Tyr
  VARIANT (4)...(4): Xaa = is Ala, Gly, D-Ala, Pro, Ile, Nva (Norvaline), alpha -aminobutyric acid, or an Ala-replacement amino acid conferring on said analog resistance to DPP-IV enzyme
  VARIANT (5)...(5): Xaa = Asp, Glu, Pro or Hpro (hydroxyproline); or Xaa-Xaa in positions 4 and 5 taken together are Xaa(psi)(CH(OH)CH2)Xaa; Xaa(psi)(CH2NH2)Xaa or Xaa(psi)(CHCH)Xaa
  VARIANT (6)...(6): Xaa = Gly or Ala
  VARIANT (7)...(7): Xaa = Ser or Ala
  VARIANT (12)...(12): Xaa = Met, Leu, Ile or an oxidatively stable Met-replacement amino acid
  VARIANT (16)...(16): Xaa = Leu or Lys
  VARIANT (18)...(18): Xaa = Asn, Lys or Ala
  VARIANT (19)...(19): Xaa = Leu or Lys
  VARIANT (21)...(21): Xaa = Ala or Thr
  VARIANT (22)...(22): Xaa = Arg, Lys, His or Ala
  VARIANT (23)...(23): Xaa = Asp or Lys
  VARIANT (29)...(29): Xaa = Ile or Leu
  VARIANT (30)...(30): Xaa = Gln or His
  VARIANT (35)...(35): Xaa = Asp or Asn
  VARIANT (36)...(36): Xaa = Arg, Lys or His with a COOH, CONH2 or a C-terminal blocking group

SEQ ID NO: 226 - protein, 37 aa, Artificial Sequence
  intestinotrophic analog of GLP-2
  VARIANT (1)...(1): Xaa = Arg, Lys or His, with an amino terminal group or an amino terminal blocking group
  VARIANT (2)...(2): Xaa = Arg, Lys or His
  VARIANT (3)...(3): Xaa = His or Tyr
  VARIANT (4)...(4): Xaa = is Ala, Gly, D-Ala, Pro, Ile, Nva (Norvaline), alpha -aminobutyric acid, or an Ala-replacement amino acid conferring on said analog resistance to DPP-IV enzyme
  VARIANT (5)...(5): Xaa = Asp, Glu, Pro or Hpro (hydroxyproline); or Xaa-Xaa in positions 4 and 5 taken together are Xaa(psi)(CH(OH)CH2)Xaa; Xaa(psi)(CH2NH2)Xaa or Xaa(psi)(CHCH)Xaa
  VARIANT (6)...(6): Xaa = Gly or Ala
  VARIANT (7)...(7): Xaa = Ser or Ala
  VARIANT (12)...(12): Xaa = Met, Leu, Ile or an oxidatively stable Met-replacement amino acid
  VARIANT (16)...(16): Xaa = Leu or Lys
  VARIANT (18)...(18): Xaa = Asn, Lys or Ala
  VARIANT (19)...(19): Xaa = Leu or Lys
  VARIANT (21)...(21): Xaa = Ala or Thr
  VARIANT (22)...(22): Xaa = Arg, Lys, His or Ala
  VARIANT (23)...(23): Xaa = Asp or Lys
  VARIANT (29)...(29): Xaa = Ile or Leu
  VARIANT (30)...(30): Xaa = Gln or His
  VARIANT (35)...(35): Xaa = Asp or Asn
  VARIANT (36)...(36): Xaa = Arg, Lys or His
  VARIANT (37)...(37): Xaa = Arg, Lys or His with a COOH, CONH2 or a C-terminal blocking group
XXXXXXXFSDGXNTVXDXXAXXXFVQWLXXTKITXXX

SEQ ID NO: 227 - protein, 32 aa, Artificial Sequence; identical to SEQ ID NO: 174
  intestinotrophic analog of GLP-2
  VARIANT (1)...(1): Xaa = His or Tyr, with an amino terminal group or an amino terminal blocking group
  VARIANT (2)...(2): Xaa = is Ala, Gly, D-Ala, Pro, Ile, Nva (Norvaline), alpha -aminobutyric acid, or an Ala-replacement amino acid conferring on said analog resistance to DPP-IV enzyme
  VARIANT (3)...(3): Xaa = Asp, Glu, Pro or Hpro (hydroxyproline); or Xaa-Xaa in positions 2 and 3 taken together are Xaa(psi)(CH(OH)CH2)Xaa; Xaa(psi)(CH2NH2)Xaa or Xaa(psi)(CHCH)Xaa
  VARIANT (4)...(4): Xaa = Gly or Ala
  VARIANT (5)...(5): Xaa = Ser or Ala
  VARIANT (13)...(13): Xaa = Leu or Lys
  VARIANT (15)...(15): Xaa = Asn, Lys or Ala
  VARIANT (16)...(16): Xaa = Leu or Lys
  VARIANT (18)...(18): Xaa = Ala or Thr
  VARIANT (19)...(19): Xaa = Arg, Lys, His or Ala
  VARIANT (20)...(20): Xaa = Asp or Lys
  VARIANT (23)...(23): Xaa = Asn or Ala
  VARIANT (26)...(26): Xaa = Ile or Leu
  VARIANT (27)...(27): Xaa = Gln or His
  VARIANT (32)...(32): Xaa = Asp or Asn, with a COOH, CONH2 or a C-terminal blocking group

SEQ ID NO: 228 - protein, 33 aa, Artificial Sequence; identical to SEQ ID NO: 175
  intestinotrophic analog of GLP-2
  VARIANT (1)...(1): Xaa = His or Tyr, with an amino terminal group or an amino terminal blocking group
  VARIANT (2)...(2): Xaa = is Ala, Gly, D-Ala, Pro, Ile, Nva (Norvaline), alpha -aminobutyric acid, or an Ala-replacement amino acid conferring on said analog resistance to DPP-IV enzyme
  VARIANT (3)...(3): Xaa = Asp, Glu, Pro or Hpro (hydroxyproline); or Xaa-Xaa in positions 2 and 3 taken together are Xaa(psi)(CH(OH)CH2)Xaa; Xaa(psi)(CH2NH2)Xaa or Xaa(psi)(CHCH)Xaa
  VARIANT (4)...(4): Xaa = Gly or Ala
  VARIANT (5)...(5): Xaa = Ser or Ala
  VARIANT (13)...(13): Xaa = Leu or Lys
  VARIANT (15)...(15): Xaa = Asn, Lys or Ala
  VARIANT (16)...(16): Xaa = Leu or Lys
  VARIANT (18)...(18): Xaa = Ala or Thr
  VARIANT (19)...(19): Xaa = Arg, Lys, His or Ala
  VARIANT (20)...(20): Xaa = Asp or Lys
  VARIANT (23)...(23): Xaa = Asn or Ala
  VARIANT (26)...(26): Xaa = Ile or Leu
  VARIANT (27)...(27): Xaa = Gln or His
  VARIANT (32)...(32): Xaa = Asp or Asn
  VARIANT (33)...(33): Xaa = Arg, Lys or His with a COOH, CONH2 or a C-terminal blocking group

SEQ ID NO: 229 - protein, 34 aa, Artificial Sequence
  intestinotrophic analog of GLP-2
  VARIANT (1)...(1): Xaa = His or Tyr, with an amino terminal group or an amino terminal blocking group
  VARIANT (2)...(2): Xaa = is Ala, Gly, D-Ala, Pro, Ile, Nva (Norvaline), alpha -aminobutyric acid, or an Ala-replacement amino acid conferring on said analog resistance to DPP-IV enzyme
  VARIANT (3)...(3): Xaa = Asp, Glu, Pro or Hpro (hydroxyproline); or Xaa-Xaa in positions 2 and 3 taken together are Xaa(psi)(CH(OH)CH2)Xaa; Xaa(psi)(CH2NH2)Xaa or Xaa(psi)(CHCH)Xaa
  VARIANT (4)...(4): Xaa = Gly or Ala
  VARIANT (5)...(5): Xaa = Ser or Ala
  VARIANT (13)...(13): Xaa = Leu or Lys
  VARIANT (15)...(15): Xaa = Asn, Lys or Ala
  VARIANT (16)...(16): Xaa = Leu or Lys
  VARIANT (18)...(18): Xaa = Ala or Thr
  VARIANT (19)...(19): Xaa = Arg, Lys, His or Ala
  VARIANT (20)...(20): Xaa = Asp or Lys
  VARIANT (23)...(23): Xaa = Asn or Ala
  VARIANT (26)...(26): Xaa = Ile or Leu
  VARIANT (27)...(27): Xaa = Gln or His
  VARIANT (32)...(32): Xaa = Asp or Asn
  VARIANT (33)...(33): Xaa = Arg, Lys or His
  VARIANT (34)...(34): Xaa = Arg, Lys or His with a COOH, CONH2 or a C-terminal blocking group
XXXXXFSDYSKYXDXXAXXXFIXWLXXTKITXXX

SEQ ID NO: 230 - protein, 33 aa, Artificial Sequence; identical to SEQ ID NO: 177
  intestinotrophic analog of GLP-2
  VARIANT (1)...(1): Xaa = Arg, Lys or His, with an amino terminal group or an amino terminal blocking group
  VARIANT (2)...(2): Xaa = His or Tyr
  VARIANT (3)...(3): Xaa = is Ala, Gly, D-Ala, Pro, Ile, Nva (Norvaline), alpha -aminobutyric acid, or an Ala-replacement amino acid conferring on said analog resistance to DPP-IV enzyme
  VARIANT (4)...(4): Xaa = Asp, Glu, Pro or Hpro (hydroxyproline); or Xaa-Xaa in positions 3 and 4 taken together are Xaa(psi)(CH(OH)CH2)Xaa; Xaa(psi)(CH2NH2)Xaa or Xaa(psi)(CHCH)Xaa
  VARIANT (5)...(5): Xaa = Gly or Ala
  VARIANT (6)...(6): Xaa = Ser or Ala
  VARIANT (14)...(14): Xaa = Leu or Lys
  VARIANT (16)...(16): Xaa = Asn, Lys or Ala
  VARIANT (17)...(17): Xaa = Leu or Lys
  VARIANT (19)...(19): Xaa = Ala or Thr
  VARIANT (20)...(20): Xaa = Arg, Lys, His or Ala
  VARIANT (21)...(21): Xaa = Asp or Lys
  VARIANT (24)...(24): Xaa = Asn or Ala
  VARIANT (27)...(27): Xaa = Ile or Leu
  VARIANT (28)...(28): Xaa = Gln or His
  VARIANT (33)...(33): Xaa = Asp or Asn, with a COOH, CONH2 or a C-terminal blocking group

SEQ ID NO: 231 - protein, 34 aa, Artificial Sequence; identical to SEQ ID NO: 178
  intestinotrophic analog of GLP-2
  VARIANT (1)...(1): Xaa = Arg, Lys or His, with an amino terminal group or an amino terminal blocking group
  VARIANT (2)...(2): Xaa = His or Tyr
  VARIANT (3)...(3): Xaa = is Ala, Gly, D-Ala, Pro, Ile, Nva (Norvaline), alpha -aminobutyric acid, or an Ala-replacement amino acid conferring on said analog resistance to DPP-IV enzyme
  VARIANT (4)...(4): Xaa = Asp, Glu, Pro or Hpro (hydroxyproline); or Xaa-Xaa in positions 3 and 4 taken together are Xaa(psi)(CH(OH)CH2)Xaa; Xaa(psi)(CH2NH2)Xaa or Xaa(psi)(CHCH)Xaa
  VARIANT (5)...(5): Xaa = Gly or Ala
  VARIANT (6)...(6): Xaa = Ser or Ala
  VARIANT (14)...(14): Xaa = Leu or Lys
  VARIANT (16)...(16): Xaa = Asn, Lys or Ala
  VARIANT (17)...(17): Xaa = Leu or Lys
  VARIANT (19)...(19): Xaa = Ala or Thr
  VARIANT (20)...(20): Xaa = Arg, Lys, His or Ala
  VARIANT (21)...(21): Xaa = Asp or Lys
  VARIANT (24)...(24): Xaa = Asn or Ala
  VARIANT (27)...(27): Xaa = Ile or Leu
  VARIANT (28)...(28): Xaa = Gln or His
  VARIANT (33)...(33): Xaa = Asp or Asn
  VARIANT (34)...(34): Xaa = Arg, Lys or His with a COOH, CONH2 or a C-terminal blocking group

SEQ ID NO: 232 - protein, 35 aa, Artificial Sequence
  intestinotrophic analog of GLP-2
  VARIANT (1)...(1): Xaa = Arg, Lys or His, with an amino terminal group or an amino terminal blocking group
  VARIANT (2)...(2): Xaa = His or Tyr
  VARIANT (3)...(3): Xaa = is Ala, Gly, D-Ala, Pro, Ile, Nva (Norvaline), alpha -aminobutyric acid, or an Ala-replacement amino acid conferring on said analog resistance to DPP-IV enzyme
  VARIANT (4)...(4): Xaa = Asp, Glu, Pro or Hpro (hydroxyproline); or Xaa-Xaa in positions 3 and 4 taken together are Xaa(psi)(CH(OH)CH2)Xaa; Xaa(psi)(CH2NH2)Xaa or Xaa(psi)(CHCH)Xaa
  VARIANT (5)...(5): Xaa = Gly or Ala
  VARIANT (6)...(6): Xaa = Ser or Ala
  VARIANT (14)...(14): Xaa = Leu or Lys
  VARIANT (16)...(16): Xaa = Asn, Lys or Ala
  VARIANT (17)...(17): Xaa = Leu or Lys
  VARIANT (19)...(19): Xaa = Ala or Thr
  VARIANT (20)...(20): Xaa = Arg, Lys, His or Ala
  VARIANT (21)...(21): Xaa = Asp or Lys
  VARIANT (24)...(24): Xaa = Asn or Ala
  VARIANT (27)...(27): Xaa = Ile or Leu
  VARIANT (28)...(28): Xaa = Gln or His
  VARIANT (33)...(33): Xaa = Asp or Asn
  VARIANT (34)...(34): Xaa = Arg, Lys or His
  VARIANT (35)...(35): Xaa = Arg, Lys or His with a COOH, CONH2 or a C-terminal blocking group
XXXXXXFSDYSKYXDXXAXXXFIXWLXXTKITXXX

SEQ ID NO: 233 - protein, 34 aa, Artificial Sequence; identical to SEQ ID NO: 180
  intestinotrophic analog of GLP-2
  VARIANT (1)...(1): Xaa = Arg, Lys or His, with an amino terminal group or an amino terminal blocking group
  VARIANT (2)...(2): Xaa = Arg, Lys or His
  VARIANT (3)...(3): Xaa = His or Tyr
  VARIANT (4)...(4): Xaa = is Ala, Gly, D-Ala, Pro, Ile, Nva (Norvaline), alpha -aminobutyric acid, or an Ala-replacement amino acid conferring on said analog resistance to DPP-IV enzyme
  VARIANT (5)...(5): Xaa = Asp, Glu, Pro or Hpro (hydroxyproline); or Xaa-Xaa in positions 4 and 5 taken together are Xaa(psi)(CH(OH)CH2)Xaa; Xaa(psi)(CH2NH2)Xaa or Xaa(psi)(CHCH)Xaa
  VARIANT (6)...(6): Xaa = Gly or Ala
  VARIANT (7)...(7): Xaa = Ser or Ala
  VARIANT (15)...(15): Xaa = Leu or Lys
  VARIANT (17)...(17): Xaa = Asn, Lys or Ala
  VARIANT (18)...(18): Xaa = Leu or Lys
  VARIANT (20)...(20): Xaa = Ala or Thr
  VARIANT (21)...(21): Xaa = Arg, Lys, His or Ala
  VARIANT (22)...(22): Xaa = Asp or Lys
  VARIANT (25)...(25): Xaa = Asn or Ala
  VARIANT (28)...(28): Xaa = Ile or Leu
  VARIANT (29)...(29): Xaa = Gln or His
  VARIANT (34)...(34): Xaa = Asp or Asn, with a COOH, CONH2 or a C-terminal blocking group

SEQ ID NO: 234 - protein, 35 aa, Artificial Sequence; identical to SEQ ID NO: 181
  intestinotrophic analog of GLP-2
  VARIANT (1)...(1): Xaa = Arg, Lys or His, with an amino terminal group or an amino terminal blocking group
  VARIANT (2)...(2): Xaa = Arg, Lys or His
  VARIANT (3)...(3): Xaa = His or Tyr
  VARIANT (4)...(4): Xaa = is Ala, Gly, D-Ala, Pro, Ile, Nva (Norvaline), alpha -aminobutyric acid, or an Ala-replacement amino acid conferring on said analog resistance to DPP-IV enzyme
  VARIANT (5)...(5): Xaa = Asp, Glu, Pro or Hpro (hydroxyproline); or Xaa-Xaa in positions 4 and 5 taken together are Xaa(psi)(CH(OH)CH2)Xaa; Xaa(psi)(CH2NH2)Xaa or Xaa(psi)(CHCH)Xaa
  VARIANT (6)...(6): Xaa = Gly or Ala
  VARIANT (7)...(7): Xaa = Ser or Ala
  VARIANT (15)...(15): Xaa = Leu or Lys
  VARIANT (17)...(17): Xaa = Asn, Lys or Ala
  VARIANT (18)...(18): Xaa = Leu or Lys
  VARIANT (20)...(20): Xaa = Ala or Thr
  VARIANT (21)...(21): Xaa = Arg, Lys, His or Ala
  VARIANT (22)...(22): Xaa = Asp or Lys
  VARIANT (25)...(25): Xaa = Asn or Ala
  VARIANT (28)...(28): Xaa = Ile or Leu
  VARIANT (29)...(29): Xaa = Gln or His
  VARIANT (34)...(34): Xaa = Asp or Asn
  VARIANT (35)...(35): Xaa = Arg, Lys or His with a COOH, CONH2 or a C-terminal blocking group

SEQ ID NO: 235 - protein, 36 aa, Artificial Sequence
  intestinotrophic analog of GLP-2
  VARIANT (1)...(1): Xaa = Arg, Lys or His, with an amino terminal group or an amino terminal blocking group
  VARIANT (2)...(2): Xaa = Arg, Lys or His
  VARIANT (3)...(3): Xaa = His or Tyr
  VARIANT (4)...(4): Xaa = is Ala, Gly, D-Ala, Pro, Ile, Nva (Norvaline), alpha -aminobutyric acid, or an Ala-replacement amino acid conferring on said analog resistance to DPP-IV enzyme
  VARIANT (5)...(5): Xaa = Asp, Glu, Pro or Hpro (hydroxyproline); or Xaa-Xaa in positions 4 and 5 taken together are Xaa(psi)(CH(OH)CH2)Xaa; Xaa(psi)(CH2NH2)Xaa or Xaa(psi)(CHCH)Xaa
  VARIANT (6)...(6): Xaa = Gly or Ala
  VARIANT (7)...(7): Xaa = Ser or Ala
  VARIANT (15)...(15): Xaa = Leu or Lys
  VARIANT (17)...(17): Xaa = Asn, Lys or Ala
  VARIANT (18)...(18): Xaa = Leu or Lys
  VARIANT (20)...(20): Xaa = Ala or Thr
  VARIANT (21)...(21): Xaa = Arg, Lys, His or Ala
  VARIANT (22)...(22): Xaa = Asp or Lys
  VARIANT (25)...(25): Xaa = Asn or Ala
  VARIANT (28)...(28): Xaa = Ile or Leu
  VARIANT (29)...(29): Xaa = Gln or His
  VARIANT (34)...(34): Xaa = Asp or Asn
  VARIANT (35)...(35): Xaa = Arg, Lys or His
  VARIANT (36)...(36): Xaa = Arg, Lys or His with a COOH, CONH2 or a C-terminal blocking group
XXXXXXXFSDYSKYXDXXAXXXFIXWLXXTKITXXX

SEQ ID NO: 236 - protein, 33 aa, Artificial Sequence; identical to SEQ ID NO: 184
  intestinotrophic analog of GLP-2
  VARIANT (1)...(1): Xaa = His or Tyr, with an amino terminal group or an amino terminal blocking group
  VARIANT (2)...(2): Xaa = is Ala, Gly, D-Ala, Pro, Ile, Nva (norvaline), alpha -aminobutyric acid, or an Ala-replacement amino acid conferring on said analog resistance to DPP-IV enzyme
  VARIANT (3)...(3): Xaa = Asp, Glu, Pro or Hpro (hydroxyproline); or Xaa-Xaa in positions 2 and 3 taken together are Xaa(psi)(CH(OH)CH2)Xaa; Xaa(psi)(CH2NH2)Xaa or Xaa(psi)(CHCH)Xaa
  VARIANT (4)...(4): Xaa = Gly or Ala
  VARIANT (5)...(5): Xaa = Ser or Ala
  VARIANT (13)...(13): Xaa = Leu or Lys
  VARIANT (15)...(15): Xaa = Asn, Lys or Ala
  VARIANT (16)...(16): Xaa = Leu or Lys
  VARIANT (18)...(18): Xaa = Ala or Thr
  VARIANT (19)...(19): Xaa = Arg, Lys, His or Ala
  VARIANT (20)...(20): Xaa = Asp or Lys
  VARIANT (26)...(26): Xaa = Ile or Leu
  VARIANT (27)...(27): Xaa = Gln or His
  VARIANT (32)...(32): Xaa = Asp or Asn
  VARIANT (33)...(33): Xaa = Arg, Lys or His with a COOH, CONH2 or a C-terminal blocking group

SEQ ID NO: 237 - protein, 34 aa, Artificial Sequence
  intestinotrophic analog of GLP-2
  VARIANT (1)...(1): Xaa = His or Tyr, with an amino terminal group or an amino terminal blocking group
  VARIANT (2)...(2): Xaa = is Ala, Gly, D-Ala, Pro, Ile, Nva (Norvaline), alpha -aminobutyric acid, or an Ala-replacement amino acid conferring on said analog resistance to DPP-IV enzyme
  VARIANT (3)...(3): Xaa = Asp, Glu, Pro or Hpro (hydroxyproline); or Xaa-Xaa in positions 2 and 3 taken together are Xaa(psi)(CH(OH)CH2)Xaa; Xaa(psi)(CH2NH2)Xaa or Xaa(psi)(CHCH)Xaa
  VARIANT (4)...(4): Xaa = Gly or Ala
  VARIANT (5)...(5): Xaa = Ser or Ala
  VARIANT (13)...(13): Xaa = Leu or Lys
  VARIANT (15)...(15): Xaa = Asn, Lys or Ala
  VARIANT (16)...(16): Xaa = Leu or Lys
  VARIANT (18)...(18): Xaa = Ala or Thr
  VARIANT (19)...(19): Xaa = Arg, Lys, His or Ala
  VARIANT (20)...(20): Xaa = Asp or Lys
  VARIANT (26)...(26): Xaa = Ile or Leu
  VARIANT (27)...(27): Xaa = Gln or His
  VARIANT (32)...(32): Xaa = Asp or Asn
  VARIANT (33)...(33): Xaa = Arg, Lys or His
  VARIANT (34)...(34): Xaa = Arg, Lys or His with a COOH, CONH2 or a C-terminal blocking group
XXXXXFSDYSKYXDXXAXXXFVQWLXXTKITXXX

SEQ ID NO: 238 - protein, 33 aa, Artificial Sequence; identical to SEQ ID NO: 186
  intestinotrophic analog of GLP-2
  VARIANT (1)...(1): Xaa = Arg, Lys or His, with an amino terminal group or an amino terminal blocking group
  VARIANT (2)...(2): Xaa = His or Tyr
  VARIANT (3)...(3): Xaa = is Ala, Gly, D-Ala, Pro, Ile, Nva (Norvaline), alpha -aminobutyric acid, or an Ala-replacement amino acid conferring on said analog resistance to DPP-IV enzyme
  VARIANT (4)...(4): Xaa = Asp, Glu, Pro or Hpro (hydroxyproline); or Xaa-Xaa in positions 3 and 4 taken together are Xaa(psi)(CH(OH)CH2)Xaa; Xaa(psi)(CH2NH2)Xaa or Xaa(psi)(CHCH)Xaa
  VARIANT (5)...(5): Xaa = Gly or Ala
  VARIANT (6)...(6): Xaa = Ser or Ala
  VARIANT (14)...(14): Xaa = Leu or Lys
  VARIANT (16)...(16): Xaa = Asn, Lys or Ala
  VARIANT (17)...(17): Xaa = Leu or Lys
  VARIANT (19)...(19): Xaa = Ala or Thr
  VARIANT (20)...(20): Xaa = Arg, Lys, His or Ala
  VARIANT (21)...(21): Xaa = Asp or Lys
  VARIANT (27)...(27): Xaa = Ile or Leu
  VARIANT (28)...(28): Xaa = Gln or His
  VARIANT (33)...(33): Xaa = Asp or Asn, with a COOH, CONH2 or a C-terminal blocking group

SEQ ID NO: 239 - protein, 34 aa, Artificial Sequence; identical to SEQ ID NO: 187
  intestinotrophic analog of GLP-2
  VARIANT (1)...(1): Xaa = Arg, Lys or His, with an amino terminal group or an amino terminal blocking group
  VARIANT (2)...(2): Xaa = His or Tyr
  VARIANT (3)...(3): Xaa = is Ala, Gly, D-Ala, Pro, Ile, Nva (Norvaline), alpha -aminobutyric acid, or an Ala-replacement amino acid conferring on said analog resistance to DPP-IV enzyme
  VARIANT (4)...(4): Xaa = Asp, Glu, Pro or Hpro (hydroxyproline); or Xaa-Xaa in positions 3 and 4 taken together are Xaa(psi)(CH(OH)CH2)Xaa; Xaa(psi)(CH2NH2)Xaa or Xaa(psi)(CHCH)Xaa
  VARIANT (5)...(5): Xaa = Gly or Ala
  VARIANT (6)...(6): Xaa = Ser or Ala
  VARIANT (14)...(14): Xaa = Leu or Lys
  VARIANT (16)...(16): Xaa = Asn, Lys or Ala
  VARIANT (17)...(17): Xaa = Leu or Lys
  VARIANT (19)...(19): Xaa = Ala or Thr
  VARIANT (20)...(20): Xaa = Arg, Lys, His or Ala
  VARIANT (21)...(21): Xaa = Asp or Lys
  VARIANT (27)...(27): Xaa = Ile or Leu
  VARIANT (28)...(28): Xaa = Gln or His
  VARIANT (33)...(33): Xaa = Asp or Asn
  VARIANT (34)...(34): Xaa = Arg, Lys or His with a COOH, CONH2 or a C-terminal blocking group

SEQ ID NO: 240 - protein, 35 aa, Artificial Sequence
  intestinotrophic analog of GLP-2
  VARIANT (1)...(1): Xaa = Arg, Lys or His, with an amino terminal group or an amino terminal blocking group
  VARIANT (2)...(2): Xaa = His or Tyr
  VARIANT (3)...(3): Xaa = is Ala, Gly, D-Ala, Pro, Ile, Nva (Norvaline), alpha -aminobutyric acid, or an Ala-replacement amino acid conferring on said analog resistance to DPP-IV enzyme
  VARIANT (4)...(4): Xaa = Asp, Glu, Pro or Hpro (hydroxyproline); or Xaa-Xaa in positions 3 and 4 taken together are Xaa(psi)(CH(OH)CH2)Xaa; Xaa(psi)(CH2NH2)Xaa or Xaa(psi)(CHCH)Xaa
  VARIANT (5)...(5): Xaa = Gly or Ala
  VARIANT (6)...(6): Xaa = Ser or Ala
  VARIANT (14)...(14): Xaa = Leu or Lys
  VARIANT (16)...(16): Xaa = Asn, Lys or Ala
  VARIANT (17)...(17): Xaa = Leu or Lys
  VARIANT (19)...(19): Xaa = Ala or Thr
  VARIANT (20)...(20): Xaa = Arg, Lys, His or Ala
  VARIANT (21)...(21): Xaa = Asp or Lys
  VARIANT (27)...(27): Xaa = Ile or Leu
  VARIANT (28)...(28): Xaa = Gln or His
  VARIANT (33)...(33): Xaa = Asp or Asn
  VARIANT (34)...(34): Xaa = Arg, Lys or His
  VARIANT (35)...(35): Xaa = Arg, Lys or His with a COOH, CONH2 or a C-terminal blocking group
XXXXXXFSDYSKYXDXXAXXXFVQWLXXTKITXXX

SEQ ID NO: 241 - protein, 34 aa, Artificial Sequence; identical to SEQ ID NO: 189
  intestinotrophic analog of GLP-2
  VARIANT (1)...(1): Xaa = Arg, Lys or His, with an amino terminal group or an amino terminal blocking group
  VARIANT (2)...(2): Xaa = Arg, Lys or His
  VARIANT (3)...(3): Xaa = His or Tyr
  VARIANT (4)...(4): Xaa = is Ala, Gly, D-Ala, Pro, Ile, Nva (Norvaline), alpha -aminobutyric acid, or an Ala-replacement amino acid conferring on said analog resistance to DPP-IV enzyme
  VARIANT (5)...(5): Xaa = Asp, Glu, Pro or Hpro (hydroxyproline); or Xaa-Xaa in positions 4 and 5 taken together are Xaa(psi)(CH(OH)CH2)Xaa; Xaa(psi)(CH2NH2)Xaa or Xaa(psi)(CHCH)Xaa
  VARIANT (6)...(6): Xaa = Gly or Ala
  VARIANT (7)...(7): Xaa = Ser or Ala
  VARIANT (15)...(15): Xaa = Leu or Lys
  VARIANT (17)...(17): Xaa = Asn, Lys or Ala
  VARIANT (18)...(18): Xaa = Leu or Lys
  VARIANT (20)...(20): Xaa = Ala or Thr
  VARIANT (21)...(21): Xaa = Arg, Lys, His or Ala
  VARIANT (22)...(22): Xaa = Asp or Lys
  VARIANT (28)...(28): Xaa = Ile or Leu
  VARIANT (29)...(29): Xaa = Gln or His
  VARIANT (34)...(34): Xaa = Asp or Asn, with a COOH, CONH2 or a C-terminal blocking group when Xaa in position 28 is absent

SEQ ID NO: 242 - protein, 35 aa, Artificial Sequence; identical to SEQ ID NO: 190
  intestinotrophic analog of GLP-2
  VARIANT (1)...(1): Xaa = Arg, Lys or His, with an amino terminal group or an amino terminal blocking group
  VARIANT (2)...(2): Xaa = Arg, Lys or His
  VARIANT (3)...(3): Xaa = His or Tyr
  VARIANT (4)...(4): Xaa = is Ala, Gly, D-Ala, Pro, Ile, Nva (Norvaline), alpha -aminobutyric acid, or an Ala-replacement amino acid conferring on said analog resistance to DPP-IV enzyme
  VARIANT (5)...(5): Xaa = Asp, Glu, Pro or Hpro (hydroxyproline); or Xaa-Xaa in positions 4 and 5 taken together are Xaa(psi)(CH(OH)CH2)Xaa; Xaa(psi)(CH2NH2)Xaa or Xaa(psi)(CHCH)Xaa
  VARIANT (6)...(6): Xaa = Gly or Ala
  VARIANT (7)...(7): Xaa = Ser or Ala
  VARIANT (15)...(15): Xaa = Leu or Lys
  VARIANT (17)...(17): Xaa = Asn, Lys or Ala
  VARIANT (18)...(18): Xaa = Leu or Lys
  VARIANT (20)...(20): Xaa = Ala or Thr
  VARIANT (21)...(21): Xaa = Arg, Lys, His or Ala
  VARIANT (22)...(22): Xaa = Asp or Lys
  VARIANT (28)...(28): Xaa = Ile or Leu
  VARIANT (29)...(29): Xaa = Gln or His
  VARIANT (34)...(34): Xaa = Asp or Asn
  VARIANT (35)...(35): Xaa = Arg, Lys or His with a COOH, CONH2 or a C-terminal blocking group

SEQ ID NO: 243 - protein, 36 aa, Artificial Sequence
  intestinotrophic analog of GLP-2
  VARIANT (1)...(1): Xaa = Arg, Lys or His, with an amino terminal group or an amino terminal blocking group
  VARIANT (2)...(2): Xaa = Arg, Lys or His
  VARIANT (3)...(3): Xaa = His or Tyr
  VARIANT (4)...(4): Xaa = is Ala, Gly, D-Ala, Pro, Ile, Nva (Norvaline), alpha -aminobutyric acid, or an Ala-replacement amino acid conferring on said analog resistance to DPP-IV enzyme
  VARIANT (5)...(5): Xaa = Asp, Glu, Pro or Hpro (hydroxyproline); or Xaa-Xaa in positions 4 and 5 taken together are Xaa(psi)(CH(OH)CH2)Xaa; Xaa(psi)(CH2NH2)Xaa or Xaa(psi)(CHCH)Xaa
  VARIANT (6)...(6): Xaa = Gly or Ala
  VARIANT (7)...(7): Xaa = Ser or Ala
  VARIANT (15)...(15): Xaa = Leu or Lys
  VARIANT (17)...(17): Xaa = Asn, Lys or Ala
  VARIANT (18)...(18): Xaa = Leu or Lys
  VARIANT (20)...(20): Xaa = Ala or Thr
  VARIANT (21)...(21): Xaa = Arg, Lys, His or Ala
  VARIANT (22)...(22): Xaa = Asp or Lys
  VARIANT (28)...(28): Xaa = Ile or Leu
  VARIANT (29)...(29): Xaa = Gln or His
  VARIANT (34)...(34): Xaa = Asp or Asn
  VARIANT (35)...(35): Xaa = Arg, Lys or His
  VARIANT (36)...(36): Xaa = Arg, Lys or His with a COOH, CONH2 or a C-terminal blocking group
XXXXXXXFSDYSKYXDXXAXXXFVQWLXXTKITXXX

SEQ ID NO: 244 - protein, 34 aa, Artificial Sequence
  intestinotrophic analog of GLP-2
  VARIANT (1)...(1): Xaa = His or Tyr, with an amino terminal group or an amino terminal blocking group
  VARIANT (2)...(2): Xaa = is Ala, Gly, D-Ala, Pro, Ile, Nva (Norvaline), alpha -aminobutyric acid, or an Ala-replacement amino acid conferring on said analog resistance to DPP-IV enzyme
  VARIANT (3)...(3): Xaa = Asp, Glu, Pro or Hpro (hydroxyproline); or Xaa-Xaa in positions 2 and 3 taken together are Xaa(psi)(CH(OH)CH2)Xaa; Xaa(psi)(CH2NH2)Xaa or Xaa(psi)(CHCH)Xaa
  VARIANT (4)...(4): Xaa = Gly or Ala
  VARIANT (5)...(5): Xaa = Ser or Ala
  VARIANT (10)...(10): Xaa = Met, Leu, Ile or an oxidatively stable Met-replacement amino acid
  VARIANT (14)...(14): Xaa = Leu or Lys
  VARIANT (16)...(16): Xaa = Asn, Lys or Ala
  VARIANT (17)...(17): Xaa = Leu or Lys
  VARIANT (19)...(19): Xaa = Ala or Thr
  VARIANT (20)...(20): Xaa = Arg, Lys, His or Ala
  VARIANT (21)...(21): Xaa = Asp or Lys
  VARIANT (28)...(28): Xaa = Ile or Leu
  VARIANT (29)...(29): Xaa = Gln or His
  VARIANT (34)...(34): Xaa = Asp or Asn, with a COOH, CONH2 or a C-terminal blocking group
XXXXXFSDEXNTIXDXXAXXXFIVQWLXXTKITX

SEQ ID NO: 245 - protein, 35 aa, Artificial Sequence
  intestinotrophic analog of GLP-2
  VARIANT (1)...(1): Xaa = His or Tyr, with an amino terminal group or an amino terminal blocking group
  VARIANT (2)...(2): Xaa = is Ala, Gly, D-Ala, Pro, Ile, Nva (Norvaline), alpha -aminobutyric acid, or an Ala-replacement amino acid conferring on said analog resistance to DPP-IV enzyme
  VARIANT (3)...(3): Xaa = Asp, Glu, Pro or Hpro (hydroxyproline); or Xaa-Xaa in positions 2 and 3 taken together are Xaa(psi)(CH(OH)CH2)Xaa; Xaa(psi)(CH2NH2)Xaa or Xaa(psi)(CHCH)Xaa
  VARIANT (4)...(4): Xaa = Gly or Ala
  VARIANT (5)...(5): Xaa = Ser or Ala
  VARIANT (10)...(10): Xaa = Met, Leu, Ile or an oxidatively stable Met-replacement amino acid
  VARIANT (14)...(14): Xaa = Leu or Lys
  VARIANT (16)...(16): Xaa = Asn, Lys or Ala
  VARIANT (17)...(17): Xaa = Leu or Lys
  VARIANT (19)...(19): Xaa = Ala or Thr
  VARIANT (20)...(20): Xaa = Arg, Lys, His or Ala
  VARIANT (21)...(21): Xaa = Asp or Lys
  VARIANT (28)...(28): Xaa = Ile or Leu
  VARIANT (29)...(29): Xaa = Gln or His
  VARIANT (34)...(34): Xaa = Asp or Asn
  VARIANT (35)...(35): Xaa = Arg, Lys or His with a COOH, CONH2 or a C-terminal blocking group
XXXXXFSDEXNTIXDXXAXXXFIVQWLXXTKITXX

SEQ ID NO: 246 - protein, 36 aa, Artificial Sequence
  intestinotrophic analog of GLP-2
  VARIANT (1)...(1): Xaa = His or Tyr, with an amino terminal group or an amino terminal blocking group
  VARIANT (2)...(2): Xaa = is Ala, Gly, D-Ala, Pro, Ile, Nva (Norvaline), alpha -aminobutyric acid, or an Ala-replacement amino acid conferring on said analog resistance to DPP-IV enzyme
  VARIANT (3)...(3): Xaa = Asp, Glu, Pro or Hpro (hydroxyproline); or Xaa-Xaa in positions 2 and 3 taken together are Xaa(psi)(CH(OH)CH2)Xaa; Xaa(psi)(CH2NH2)Xaa or Xaa(psi)(CHCH)Xaa
  VARIANT (4)...(4): Xaa = Gly or Ala
  VARIANT (5)...(5): Xaa = Ser or Ala
  VARIANT (10)...(10): Xaa = Met, Leu, Ile or an oxidatively stable Met-replacement amino acid
  VARIANT (14)...(14): Xaa = Leu or Lys
  VARIANT (16)...(16): Xaa = Asn, Lys or Ala
  VARIANT (17)...(17): Xaa = Leu or Lys
  VARIANT (19)...(19): Xaa = Ala or Thr
  VARIANT (20)...(20): Xaa = Arg, Lys, His or Ala
  VARIANT (21)...(21): Xaa = Asp or Lys
  VARIANT (28)...(28): Xaa = Ile or Leu
  VARIANT (29)...(29): Xaa = Gln or His
  VARIANT (34)...(34): Xaa = Asp or Asn
  VARIANT (35)...(35): Xaa = Arg, Lys or His
  VARIANT (36)...(36): Xaa = Arg, Lys or His with a COOH, CONH2 or a C-terminal blocking group
XXXXXFSDEXNTIXDXXAXXXFIVQWLXXTKITXXX

SEQ ID NO: 247 - protein, 35 aa, Artificial Sequence
  intestinotrophic analog of GLP-2
  VARIANT (1)...(1): Xaa = Arg, Lys or His, with an amino terminal group or an amino terminal blocking group
  VARIANT (2)...(2): Xaa = His or Tyr
  VARIANT (3)...(3): Xaa = is Ala, Gly, D-Ala, Pro, Ile, Nva (Norvaline), alpha -aminobutyric acid, or an Ala-replacement amino acid conferring on said analog resistance to DPP-IV enzyme
  VARIANT (4)...(4): Xaa = Asp, Glu, Pro or Hpro (hydroxyproline); or Xaa-Xaa in positions 3 and 4 taken together are Xaa(psi)(CH(OH)CH2)Xaa; Xaa(psi)(CH2NH2)Xaa or Xaa(psi)(CHCH)Xaa
  VARIANT (5)...(5): Xaa = Gly or Ala
  VARIANT (6)...(6): Xaa = Ser or Ala
  VARIANT (11)...(11): Xaa = Met, Leu, Ile or an oxidatively stable Met-replacement amino acid
  VARIANT (15)...(15): Xaa = Leu or Lys
  VARIANT (17)...(17): Xaa = Asn, Lys or Ala
  VARIANT (18)...(18): Xaa = Leu or Lys
  VARIANT (20)...(20): Xaa = Ala or Thr
  VARIANT (21)...(21): Xaa = Arg, Lys, His or Ala
  VARIANT (22)...(22): Xaa = Asp or Lys
  VARIANT (29)...(29): Xaa = Ile or Leu
  VARIANT (30)...(30): Xaa = Gln or His
  VARIANT (35)...(35): Xaa = Asp or Asn, with a COOH, CONH2 or a C-terminal blocking group
XXXXXXFSDEXNTIXDXXAXXXFIVQWLXXTKITX

SEQ ID NO: 248 - protein, 36 aa, Artificial Sequence
  intestinotrophic analog of GLP-2
  VARIANT (1)...(1): Xaa = Arg, Lys or His, with an amino terminal group or an amino terminal blocking group
  VARIANT (2)...(2): Xaa = His or Tyr
  VARIANT (3)...(3): Xaa = is Ala, Gly, D-Ala, Pro, Ile, Nva (Norvaline), alpha -aminobutyric acid, or an Ala-replacement amino acid conferring on said analog resistance to DPP-IV enzyme
  VARIANT (4)...(4): Xaa = Asp, Glu, Pro or Hpro (hydroxyproline); or Xaa-Xaa in positions 3 and 4 taken together are Xaa(psi)(CH(OH)CH2)Xaa; Xaa(psi)(CH2NH2)Xaa or Xaa(psi)(CHCH)Xaa
  VARIANT (5)...(5): Xaa = Gly or Ala
  VARIANT (6)...(6): Xaa = Ser or Ala
  VARIANT (11)...(11): Xaa = Met, Leu, Ile or an oxidatively stable Met-replacement amino acid
  VARIANT (15)...(15): Xaa = Leu or Lys
  VARIANT (17)...(17): Xaa = Asn, Lys or Ala
  VARIANT (18)...(18): Xaa = Leu or Lys
  VARIANT (20)...(20): Xaa = Ala or Thr
  VARIANT (21)...(21): Xaa = Arg, Lys, His or Ala
  VARIANT (22)...(22): Xaa = Asp or Lys
  VARIANT (29)...(29): Xaa = Ile or Leu
  VARIANT (30)...(30): Xaa = Gln or His
  VARIANT (35)...(35): Xaa = Asp or Asn
  VARIANT (36)...(36): Xaa = Arg, Lys or His with a COOH, CONH2 or a C-terminal blocking group
XXXXXXFSDEXNTIXDXXAXXXFIVQWLXXTKITXX

SEQ ID NO: 249 - protein, 37 aa, Artificial Sequence
  intestinotrophic analog of GLP-2
  VARIANT (1)...(1): Xaa = Arg, Lys or His, with an amino terminal group or an amino terminal blocking group
  VARIANT (2)...(2): Xaa = His or Tyr
  VARIANT (3)...(3): Xaa = is Ala, Gly, D-Ala, Pro, Ile, Nva (Norvaline), alpha -aminobutyric acid, or an Ala-replacement amino acid conferring on said analog resistance to DPP-IV enzyme
  VARIANT (4)...(4): Xaa = Asp, Glu, Pro or Hpro (hydroxyproline); or Xaa-Xaa in positions 3 and 4 taken together are Xaa(psi)(CH(OH)CH2)Xaa; Xaa(psi)(CH2NH2)Xaa or Xaa(psi)(CHCH)Xaa
  VARIANT (5)...(5): Xaa = Gly or Ala
  VARIANT (6)...(6): Xaa = Ser or Ala
  VARIANT (11)...(11): Xaa = Met, Leu, Ile or an oxidatively stable Met-replacement amino acid
  VARIANT (15)...(15): Xaa = Leu or Lys
  VARIANT (17)...(17): Xaa = Asn, Lys or Ala
  VARIANT (18)...(18): Xaa = Leu or Lys
  VARIANT (20)...(20): Xaa = Ala or Thr
  VARIANT (21)...(21): Xaa = Arg, Lys, His or Ala
  VARIANT (22)...(22): Xaa = Asp or Lys
  VARIANT (29)...(29): Xaa = Ile or Leu
  VARIANT (30)...(30): Xaa = Gln or His
  VARIANT (35)...(35): Xaa = Asp or Asn
  VARIANT (36)...(36): Xaa = Arg, Lys or His
  VARIANT (37)...(37): Xaa = Arg, Lys or His with a COOH, CONH2 or a C-terminal blocking group
XXXXXXFSDEXNTIXDXXAXXXFIVQWLXXTKITXXX

SEQ ID NO: 250 - protein, 36 aa, Artificial Sequence
  intestinotrophic analog of GLP-2
  VARIANT (1)...(1): Xaa = Arg, Lys or His, with an amino terminal group or an amino terminal blocking group
  VARIANT (2)...(2): Xaa = Arg, Lys or His
  VARIANT (3)...(3): Xaa = His or Tyr
  VARIANT (4)...(4): Xaa = is Ala, Gly, D-Ala, Pro, Ile, Nva (Norvaline), alpha -aminobutyric acid, or an Ala-replacement amino acid conferring on said analog resistance to DPP-IV enzyme
  VARIANT (5)...(5): Xaa = Asp, Glu, Pro or Hpro (hydroxyproline); or Xaa-Xaa in positions 4 and 5 taken together are Xaa(psi)(CH(OH)CH2)Xaa; Xaa(psi)(CH2NH2)Xaa or Xaa(psi)(CHCH)Xaa
  VARIANT (6)...(6): Xaa = Gly or Ala
  VARIANT (7)...(7): Xaa = Ser or Ala
  VARIANT (12)...(12): Xaa = Met, Leu, Ile or an oxidatively stable Met-replacement amino acid
  VARIANT (16)...(16): Xaa = Leu or Lys
  VARIANT (18)...(18): Xaa = Asn, Lys or Ala
  VARIANT (19)...(19): Xaa = Leu or Lys
  VARIANT (21)...(21): Xaa = Ala or Thr
  VARIANT (22)...(22): Xaa = Arg, Lys, His or Ala
  VARIANT (23)...(23): Xaa = Asp or Lys
  VARIANT (30)...(30): Xaa = Ile or Leu
  VARIANT (31)...(31): Xaa = Gln or His
  VARIANT (36)...(36): Xaa = Asp or Asn, with a COOH, CONH2 or a C-terminal blocking group
XXXXXXXFSDEXNTIXDXXAXXXFIVQWLXXTKITX

SEQ ID NO: 251 - protein, 37 aa, Artificial Sequence
  intestinotrophic analog of GLP-2
  VARIANT (1)...(1): Xaa = Arg, Lys or His, with an amino terminal group or an amino terminal blocking group
  VARIANT (2)...(2): Xaa = Arg, Lys or His
  VARIANT (3)...(3): Xaa = His or Tyr
  VARIANT (4)...(4): Xaa = is Ala, Gly, D-Ala, Pro, Ile, Nva (Norvaline), alpha -aminobutyric acid, or an Ala-replacement amino acid conferring on said analog resistance to DPP-IV enzyme
  VARIANT (5)...(5): Xaa = Asp, Glu, Pro or Hpro (hydroxyproline); or Xaa-Xaa in positions 4 and 5 taken together are Xaa(psi)(CH(OH)CH2)Xaa; Xaa(psi)(CH2NH2)Xaa or Xaa(psi)(CHCH)Xaa
  VARIANT (6)...(6): Xaa = Gly or Ala
  VARIANT (7)...(7): Xaa = Ser or Ala
  VARIANT (12)...(12): Xaa = Met, Leu, Ile or an oxidatively stable Met-replacement amino acid
  VARIANT (16)...(16): Xaa = Leu or Lys
  VARIANT (18)...(18): Xaa = Asn, Lys or Ala
  VARIANT (19)...(19): Xaa = Leu or Lys
  VARIANT (21)...(21): Xaa = Ala or Thr
  VARIANT (22)...(22): Xaa = Arg, Lys, His or Ala
  VARIANT (23)...(23): Xaa = Asp or Lys
  VARIANT (30)...(30): Xaa = Ile or Leu
  VARIANT (31)...(31): Xaa = Gln or His
  VARIANT (36)...(36): Xaa = Asp or Asn
  VARIANT (37)...(37): Xaa = Arg, Lys or His with a COOH, CONH2 or a C-terminal blocking group
XXXXXXXFSDEXNTIXDXXAXXXFIVQWLXXTKITXX

SEQ ID NO: 252 - protein, 38 aa, Artificial Sequence
  intestinotrophic analog of GLP-2
  VARIANT (1)...(1): Xaa = Arg, Lys or His, with an amino terminal group or an amino terminal blocking group
  VARIANT (2)...(2): Xaa = Arg, Lys or His
  VARIANT (3)...(3): Xaa = His or Tyr
  VARIANT (4)...(4): Xaa = is Ala, Gly, D-Ala, Pro, Ile, Nva (Norvaline), alpha -aminobutyric acid, or an Ala-replacement amino acid conferring on said analog resistance to DPP-IV enzyme
  VARIANT (5)...(5): Xaa = Asp, Glu, Pro or Hpro (hydroxyproline); or Xaa-Xaa in positions 4 and 5 taken together are Xaa(psi)(CH(OH)CH2)Xaa; Xaa(psi)(CH2NH2)Xaa or Xaa(psi)(CHCH)Xaa
  VARIANT (6)...(6): Xaa = Gly or Ala
  VARIANT (7)...(7): Xaa = Ser or Ala
  VARIANT (12)...(12): Xaa = Met, Leu, Ile or an oxidatively stable Met-replacement amino acid
  VARIANT (16)...(16): Xaa = Leu or Lys
  VARIANT (18)...(18): Xaa = Asn, Lys or Ala
  VARIANT (19)...(19): Xaa = Leu or Lys
  VARIANT (21)...(21): Xaa = Ala or Thr
  VARIANT (22)...(22): Xaa = Arg, Lys, His or Ala
  VARIANT (23)...(23): Xaa = Asp or Lys
  VARIANT (30)...(30): Xaa = Ile or Leu
  VARIANT (31)...(31): Xaa = Gln or His
  VARIANT (36)...(36): Xaa = Asp or Asn
  VARIANT (37)...(37): Xaa = Arg, Lys or His
  VARIANT (38)...(38): Xaa = Arg, Lys or His with a COOH, CONH2 or a C-terminal blocking group
XXXXXXXFSDEXNTIXDXXAXXXFIVQWLXXTKITXXX
